(19) United States
(12) Patent Application Publication
(10) Pub. No.: US 2024/0336983 A1
(43) Pub. Date: Oct. 10, 2024

(54) PSEUDOMONAS SYRINGAE PV. TABACI-RESISTANT SHORT WZ INTROGRESSION SEGMENT, USE, AND SCREENING METHOD THEREOF

(71) Applicant: Yunnan Academy Of Tobacco Agricultural Sciences, Kunming (CN)

(72) Inventor: Yong LIU, Kunming (CN)

(73) Assignee: Yunnan Academy Of Tobacco Agricultural Sciences, Kunming (CN)

(21) Appl. No.: 18/354,694

(22) Filed: Jul. 19, 2023

(30) Foreign Application Priority Data
Apr. 4, 2023 (CN) 202310353049.4

(51) Int. Cl. C12Q 1/6895; A01H 1/04

(52) U.S. Cl. CPC C12Q 1/6895; A01H 1/04; C12Q 2600/13

(57) ABSTRACT

A Pseudomonas syringae pv. tabaci-resistant short WZ introgression segment and use thereof are provided. Compared with a long WZ introgression segment, the short WZ introgression segment is reduced by a drag gene component of at least 500 Kb. The short WZ introgression segment can be used for selective breeding of a Pseudomonas syringae pv. tabaci-resistant N. tabacum variety without obvious yield and quality disadvantages, which has promising application prospects. A simple screening method for an N. tabacum plant with the short WZ segment is also provided, where a homozygous N. tabacum plant with a long WZ introgression segment is hybridized with an N. tabacum plant without a long WZ introgression segment to quickly and efficiently obtain an N. tabacum plant with the short WZ segment, which provides an experimental basis for the acquisition of the Pseudomonas syringae pv. tabaci-resistant short WZ introgression segment.

### CROSS REFERENCE TO THE RELATED APPLICATIONS

[0001] This application is based upon and claims priority to Chinese Patent Application No. 2023103530494, filed on Apr. 4, 2023, the entire contents of which are incorporated herein by reference.

### SEQUENCE LISTING

[0002] The instant application contains a Sequence Listing which has been submitted in XML format via EFS-Web and is hereby incorporated by reference in its entirety. Said XML copy is named GBDHHY008-PKG_Sequence Listing.xml, created on Jul. 18, 2023, and is 2,018,909 bytes in size.

### TECHNICAL FIELD

[0003] The present disclosure relates to the technical field of Nicotiana tabacum (N. tabacum) breeding, particularly to a Pseudomonas syringae pv. tabaci-resistant short WZ introgression segment, use, and screening method thereof.

### BACKGROUND

[0004] Pseudomonas syringae pv. tabaci is a major disease in N. tabacum, and the cultivation of a Pseudomonas syringae pv. tabaci-resistant variety is the most fundamental and economical means for preventing and controlling Pseudomonas syringae pv. tabaci. A promoted Pseudomonas syringae pv. tabaci-resistant variety needs to have high resistance and no yield and agronomic trait disadvantages.

[0005] At present, the resistance of a Pseudomonas syringae pv. tabaci-resistant flue-cured tobacco variety is mainly derived from Nicotiana rustica (N. rustica) var. Brasilea (wild-type (WT) N. tabacum). N. rustica cv. Brasilia (coding: W146) is hybridized with a plant of the tetraploid N. tabacum cv. Kutsaga 51, and resulting F₁ plants are a Pseudomonas syringae pv. tabaci-resistant strain No. 1. F₁ is hybridized with N. tabacum cv. Kutsaga 51 to obtain a segregation population, and a Pseudomonas syringae pv. tabaci-resistant individual is screened out through inoculation. The Pseudomonas syringae pv. tabaci-resistant individual is self-crossed for 2 generations to obtain three individuals with chromosome stability, and the three individuals are further self-crossed for 2 generations to obtain a Pseudomonas syringae pv. tabaci-resistant strain with promising breeding prospects. The yield and quality of the Pseudomonas syringae pv. tabaci-resistant strain are lower than those of a control standard variety and has the adverse trait of lodging tendency inherited from N. rustica (Ternouth et al., 1988). The inheritance of Pseudomonas syringae pv. tabaci resistance in flue-cured tobacco derived from N. rustica is controlled by a dominant single locus (Woodend, et al., 1992). The transfer of Pseudomonas syringae pv. tabaci resistance by cross-breeding refers to the transfer of a Pseudomonas syringae pv. tabaci-resistant chromosome segment of N. rustica (referred to as WZ introgression segment).

[0006] Root systems of near-isogenic lines (NILs) with or without a long WZ introgression segment are subjected to RNA sequencing analysis. SNPs, INDELs, and differentially-expressed genes among NILs are analyzed. Analysis results show that the long WZ introgression segment replaces an interval of approximately 65 Mb on chromosome 19 of N. tabacum, which indirectly indicates that the long WZ introgression segment has a size of about 65 Mb (Shi, et al., 2019).

[0007] Four possible mechanisms by which an introgression segment in N. tabacum from the WT variety leads to adverse traits include linkage drag, pleiotropy, position effects, and replacement of a chromosome segment carrying a superior gene. When any one of the above four mechanisms works, the introgression segment will bring adverse traits to a recipient parent (Chaplin and Mann, 1978). For example, it has also been reported that flue-cured tobacco with a long N introgression segment derived from Nicotiana glutinosa (N. glutinosa) has a yield reduced by 148 kg/ha on average. Flu-cured tobacco leaves have a light color, greyish at a leaf base (Chaplin et al., 1961), and high nicotine and total nitrogen (TN) contents (Lewis et al., 2007).

[0008] Studies have shown that long WZ introgression segments in flue-cured tobacco are not negatively correlated with its yield, output value, grade index, total plant alkaloid content, and reducing sugar content (Drake, et al., 2015). However, the introduction of a chromosome segment of up to 65 Mb from N. rustica into flue-cured tobacco may bring other adverse traits. It is expected to obtain a breeding line with excellent comprehensive traits by acquiring a Pseudomonas syringae pv. tabaci-resistant short WZ introgression segment and introducing the short WZ introgression segment into a flue-cured tobacco plant.

[0009] It is assumed that the linkage drag comes from non-target gene components linked to disease resistance on the long WZ introgression segment (referred to as drag gene components). The reduction of the non-target gene components linked to disease resistance on the long WZ introgression segment is expected to reduce the linkage drag of the long WZ introgression segment. However, the long WZ introgression segment has low homology with chromosomes of N. tabacum, and thus, the long WZ. introgression segment can hardly undergo a chromosome exchange with N. tabacum. Even if a chromosome exchange occurs, a conventional breeding technique cannot screen out a chromosome-exchanged plant with a short WZ introgression segment from a breeding population because a drag phenotype is a quantitative trait that is susceptible to environmental conditions and can hardly be screened out during early breeding. The acquisition of a plant with a short WZ introgression segment is expected to reduce drag gene components.

### SUMMARY

[0010] A first objective of the present disclosure is to provide a Pseudomonas syringae pv. tabaci-resistant short WZ introgression segment. Compared with the long WZ introgression segment, the reduction of non-target gene components linked to disease resistance on the long WZ introgression segment is expected to reduce the linkage drag of the long WZ introgression segment, which has promising application prospects.

[0011] A second objective of the present disclosure is to provide the use of the short WZ introgression segment described above in an N. tabacum plant. An N. tabacum plant with the short WZ introgression segment has Pseudomonas syringae pv. tabaci resistance and a lack of drag gene components linked to disease resistance, which can reduce the linkage drag of the WZ introgression segment; thus, the short WZ introgression segment can be used for selective breeding of a Pseudomonas syringae pv. tabaci-resistant N. tabacum variety without obvious yield and quality disadvantages.

[0012] A third objective of the present disclosure is to provide a screening method for an N. tabacum plant with the short WZ segment, which is easy to implement, can quickly map a position of a non-target gene segment, and can be used for accurate screening of an N. tabacum plant with the short WZ segment.

[0013] Embodiments of the present disclosure are implemented as follows:

[0014] A Pseudomonas syringae pv. tabaci-resistant short WZ introgression segment is provided. Compared with a long WZ introgression segment, the short WZ introgression segment is reduced by drag gene components of at least 500 Kb. The drag gene components include a sequence shown in SEQ ID NO: 1 and/or a sequence shown in SEQ ID NO: 2, and a gene segment adjacent to the sequence shown in SEQ ID NO: 1 and/or the sequence shown in SEQ ID NO: 2.

[0015] Use of the Pseudomonas syringae pv. tabaci-resistant short WZ introgression segment described above in an N. tabacum plant is provided.

[0016] A screening method for an N. tabacum plant with a short WZ introgression segment is provided, including:

[0017] A first parent N. tabacum plant is hybridized with a second parent N. tabacum plant to obtain an F₁ N. tabacum plant. The first parent N. tabacum plant is a homozygous N. tabacum plant with a long WZ introgression segment and has a genotype of WZWZ. The second parent N. tabacum plant is an N. tabacum plant without a long WZ introgression segment and has a genotype of wzwz. The F₁ N. tabacum plant has a genotype of WZwz.

[0018] The F₁ N. tabacum plant is self-crossed or the F₁ N. tabacum plant is back-crossed with the second parent N. tabacum plant to obtain a breeding population material with a genotype of WZwz.

[0019] Multiple primer pairs are used to test the breeding population material, and an individual plant tested as negative by at least one of the primer pairs is screened out. At least one of the primer pairs is an N. tabacum plant with a short WZ segment.

[0020] The embodiments of the present disclosure have the following beneficial effects:

[0021] An embodiment of the present disclosure provides a Pseudomonas syringae pv. tabaci-resistant short WZ introgression segment and use thereof. Compared with a long WZ introgression segment, the short WZ introgression segment is reduced by a drag gene of at least 500 Kb. The short WZ introgression segment can be used for selective breeding of a Pseudomonas syringae pv. tabaci-resistant N. tabacum variety without obvious yield and quality disadvantages, which has promising application prospects. An embodiment of the present disclosure also provides a simple screening method for an N. tabacum plant with the short WZ segment, where a homozygous N. tabacum plant with a long WZ introgression segment is hybridized with an N. tabacum plant without a long WZ introgression segment to quickly and efficiently obtain an N. tabacum plant with the short WZ segment, which provides an experimental basis for the acquisition of the Pseudomonas syringae pv. tabaci-resistant short WZ introgression segment.

### DETAILED DESCRIPTION OF THE EMBODIMENTS

[0022] To make the objectives, technical solutions, and advantages of the embodiments of the present disclosure clear, the technical solutions in the embodiments of the present disclosure will be described clearly and completely below. If no specific conditions are specified in the embodiments, the embodiments will be implemented under conventional conditions or the conditions recommended by the manufacturer. All of the used reagents or instruments are conventional commercially-available products if the manufacturer has not been identified

[0023] The Pseudomonas syringae pv. tabaci-resistant short WZ introgression segment, the use, and the screening method thereof in an embodiment of the present disclosure are specifically described below.

[0024] An embodiment of the present disclosure provides a Pseudomonas syringae pv. tabaci-resistant short WZ introgression segment. Compared with a long WZ introgression segment, the short WZ introgression segment is reduced by a drag gene component of at least 500 Kb. The drag gene component includes a sequence shown in SEQ ID NO: 1 and/or a sequence shown in SEQ ID NO: 2, and a gene segment adjacent to the sequence shown in SEQ ID NO: 1 and/or the sequence shown in SEQ ID NO: 2.

[0025] In the context of the present disclosure, the term “WZ introgression segment” refers to a chromosome segment with Pseudomonas syringae pv. tabaci resistance from WT N. rustica.

[0026] The term “short WZ introgression segment” refers to a DNA segment obtained by partially or completely deleting a non-target gene component (referred to as a drag gene component) linked to disease resistance on the WZ introgression segment and retaining disease resistance such as Pseudomonas syringae pv. tabaci.

[0027] The term “drag gene component” refers to a gene component on the WZ introgression segment that includes a drag gene but does not have resistance for a target disease such as Pseudomonas syringae pv. tabaci.

[0028] Studies have shown that the long WZ introgression segment replaces an interval of about 65 Mb on chromosome 19 of N. tabacum, which indirectly indicates that the long WZ introgression segment has a size of about 65 Mb (Shi, et al., 2019. Supplemental Table S1. Primer sequences used for KASP or CAPS SNP marker genotyping for the presence/absence of the introgressed). The genomic diversity between the long WZ introgression segment and chromosome 19 of N. tabacum will significantly limit a chromosome exchange, resulting in a low possibility of recombination between the long WZ introgression segment and N. tabacum. The introduction of a chromosome segment of up to 65 Mb from N. rustica into flue-cured tobacco is very likely to bring other adverse traits for an N. tabacum plant. In an embodiment of the present disclosure, a drag gene component of at least 500 Kb is reduced from the original WZ introgression segment to obtain a Pseudomonas syringae pv. tabaci-resistant short Wz introgression segment, and the introduction of the short Wz introgression segment into a flue-cured tobacco plant is expected to reduce the linkage drag of the long WZ introgression segment, thereby acquiring a breeding line with excellent comprehensive traits.

[0029] The short WZ introgression segment is tested as positive for a KASP-10.6 primer pair and a KASP-29.9 primer pair, and the short WZ introgression segment is tested as negative for a KASP-5.1 primer pair and/or a KASP-42.3 primer pair. The above sequences are shown in Table 1.

TABLE 1
Primer pair sequences

| Primer pair | | | |
|---|---|---|---|
| name | Primer name | Primer sequence | Remarks |
| KASP-5.1 | KASP-5.1-F | GAAGGTGACCAAGTTCATGCTCGTTTACTGGC | SEQ ID NO: 3 |
| | | GCCTGATC | |
| | KASP-5.1-H | GAAGGTCGGAGTCAACGGATTGTTTACTGGCG | SEQ ID NO: 4 |
| | | CCTGAGT | |
| | KASP-5.1-CR | CTCCGTCTACACTGACTACCT | SEQ ID NO: 5 |
| KASP-10.6 | KASP-10.6-F | GAAGGTGACCAAGTTCATGCTTCAGTGGCAAA | SEQ ID NO: 6 |
| | | AGCTGCAAG | |
| | KASP-10.6-H | GAAGGTCGGAGTCAACGGATTTCAGTGGCAA | SEQ ID NO: 7 |
| | | AAGCTGCTAA | |
| | KASP-10.6-CR | GCCACACAGGATCTCTCATTGATTG | SEQ ID NO: 8 |
| KASP-29.9 | KASP-29.9-F | GAAGGTGACCAAGTTCATGCTCACTGATTCAG | SEQ ID NO: 9 |
| | | ATCTTGAGGGAT | |
| | KASP-29.9-H | GAAGGTCGGAGTCAACGGATTACACTGATTCA | SEQ ID NO: 10 |
| | | GATCTTGAGGAAG | |
| | KASP-29.9-CR | GTTTTCCCCACACTCAGGT | SEQ ID NO: 11 |
| KASP-42.3 | KASP-42.3-F | GAAGGTGACCAAGTTCATGCTAGATACCTTTC | SEQ ID NO: 12 |
| | | CGAACTCCGG | |
| | KASP-42.3-H | GAAGGTCGGAGTCAACGGATTGAGATACCTTT | SEQ ID NO: 13 |
| | | CCGAACTCCCA | |
| | KASP-42.3-CR | GGAGAGGTCCAAAGTTACTAAATCG | SEQ ID NO: 14 |

Notes:
F: FAM-tag, H: HEX-tag, CR: Commen Reverse

[0030] The short WZ introgression segment is tested as positive for a KASP-10.6 primer pair and a KASP-29.9 primer pair, indicating that gene sequences corresponding to the KASP-10.6 primer pair and the KASP-29.9 primer pair are retained in the short WZ introgression segment, which are target gene sequences associated with Pseudomonas syringae pv. tabaci resistance. The short WZ introgression segment is tested as negative for a KASP-5.1 primer pair and/or a KASP-42.3 primer pair, indicating that gene sequences corresponding to the KASP-5.1 primer pair and/or the KASP-42.3 primer pair are deleted in the short WZ introgression segment, which are non-target gene sequences, namely, drag genes.

[0031] Further, those skilled in the art should understand that 1 to 30 bases may be added to a 5′ or 3′ terminus of each of the sequences shown in SEQ ID NOS: 3-14, and a type of added base can be determined according to a type of a base in a region matching each of SEQ ID NOS: 3-14 on the N. tabacum genome DNA and a principle of base pairing, and a resulting primer pair is basically the same as an amplification product for each of SEQ ID NOS: 3-14 (a DNA sequence between upstream and downstream primers). Thus, primer pairs obtained by adding 1 to 30 bases to a 5′ or 3′ terminus of each of SEQ ID NOS: 3-14 that can amplify substantially the same DNA segments are included in the primer pairs of the present disclosure. In a specific embodiment of the present disclosure, the primer pairs of the present disclosure are preferably sequences shown in SEQ ID NOS: 3-14.

[0032] Further, the short WZ introgression segment is obtained by chromosome exchange, genome editing, chemical mutagenesis, or physical mutagenesis. There is also a crossbreeding method, where a WZwz population material is bred, and then a chromosome-exchanged plant is screened out. The chemical or physical mutagenesis method or the biotechnological genome editing method is used to screen out a mutant in which the sequence of the drag gene with a sequence shown in SEQ ID NO: 1 and/or SEQ ID NO: 2 is partially or completely deleted. The chemical mutagenesis method includes treatment by a mutagenic agent such as sodium azide, ethidium bromide, ethyl methanesulfonate (EMS), or the like. The physical mutagenesis method includes X-ray radiation, γ-ray radiation, fast neutron radiation, heavy ion radiation, and ultraviolet (UV) radiation. The biotechnological genome editing method includes the use of a CRISPR/Cas9 technology, a zinc-finger nuclease (ZFN) technology, or a transcription activator-like effector nuclease (TALEN) technology to knock out a part or all of the sequences of the drag gene shown in SEQ ID NO: 1 and/or SEQ ID NO: 2. The partial sequence has an appropriate length, which is not particularly limited, and may be 10 Kb, 100 Kb, 500 Kb, or 1,000 Kb, for example.

[0033] An embodiment of the present disclosure also provides the use of the Pseudomonas syringae pv. tabaci-resistant short WZ introgression segment described above in an N. tabacum plant.

[0034] Those skilled in the art should understand that the short WZ introgression segment can be used for common N. tabacum varieties, including, but not limited to, K326, Yunyan 87, Yunyan 97, Yunyan 85, Yunyan 116, Yunyan 121, NC89, Zhongyan 100, Honghuadajinyuan, and Cuibi No. 1.

[0035] An embodiment of the present disclosure also provides a screening method for an N. tabacum plant with a short WZ segment, including:

[0036] SI. A first parent N. tabacum plant is hybridized with a second parent N. tabacum plant to obtain a F₁ N. tabacum plant.

[0037] The first parent N. tabacum plant is a homozygous N. tabacum plant with a long WZ introgression segment and has a genotype of WZWZ, including, but not limited to, flue-cured tobacco, burley tobacco, air-cured tobacco, aromatic tobacco, and cigar tobacco. The second parent N. tabacum plant is an N. tabacum plant without a long WZ introgression segment and has a genotype of wzwz, including, but not limited to, flue-cured tobacco, burley tobacco, air-cured tobacco, aromatic tobacco, and cigar tobacco. Phenotypic traits of the N. tabacum with the genotype of wzwz include disease resistance, high yield, high-grade index, easy baking, leaf quality, plant height, maturity characteristics of anywhere between early maturity and late maturity, and plant leaf number from medium to high. The N. tabacum with the genotype of wzwz preferably includes, but is not limited to, K326, Yunyan 87, Yunyan 97, Yunyan 85, NC89, Zhongyan 100, Honghuadajinyuan, and Cuibi No. 1. The F₁ N. tabacum plant obtained by the hybridization has a genotype of WZwz.

[0038] The screening method for an N. tabacum plant with a short WZ segment provided in the embodiment of the present disclosure further includes:

[0039] S2. The F₁ N. tabacum plant is self-crossed or back-crossed with the second parent N. tabacum plant to obtain a breeding population material with a genotype of WZwz.

[0040] The population material includes a breeding population material with a genotype of WZwz and is preferably a backcrossing population material BC₁F₁, BC₂F₁, BC₃F₁, BC₄F₁, BC₅F₁ . . . BCₙF₁, where n represents a number of generations of backcrossing, which may be 6, 7, 8, 9, 10, or 15. The population material also includes another population material, such as a self-crossing population material F₂ with a genotype of WZwz.

[0041] S3. Multiple primer pairs are used to test the breeding population material, and an individual plant tested as negative for at least one of the primer pairs is screened out, which is an N. tabacum plant with a short WZ segment.

[0042] The selected primer pairs are molecular markers of the WZ gene or molecular markers closely linked to the WZ gene. A negative test result indicates that gene sequences corresponding to the primer pair are deleted, and a positive test result indicates that gene sequences corresponding to the primer pair are retained. According to molecular marker test results, short WZ introgression segments with gene sequence deletions at different locations can be obtained.

[0043] According to molecular marker test results, a disease-resistant phenotype selection method is also required to further map a location of a drag gene, including:

[0044] S4. Pseudomonas syringae is inoculated into different N. tabacum seedlings of the individual plant, and a Pseudomonas syringae pv. tabaci-resistant plant is screened out. According to the test results of the primer pairs for the Pseudomonas syringae pv. tabaci-resistant plant, a primer pair leading to a negative test result is selected, and sequences corresponding to the primer pair are denoted as marker sequences.

[0045] The marker sequences are only a small part of the sequence of the drag gene, which can only help locate a location of the drag gene; and genome resequencing is further required to obtain an accurate sequence of the drag gene, including:

[0046] S5. DNA of the Pseudomonas syringae pv. tabaci-resistant plant is extracted and subjected to genome resequencing, and a sequencing result is compared with the first parent N. tabacum plant and the second parent N. tabacum plant to determine a length range of a drag gene with the marker sequences.

[0047] Similarly, with the above method, a Pseudomonas syringae pv. tabaci-resistant plant can also be screened out. According to the test results of the primer pairs for the Pseudomonas syringae pv. tabaci-resistant plant, a primer pair leading to a negative test result is selected, and sequences corresponding to the primer pair are denoted as marker sequences. In this case, the primer pair leading to a negative test result marks an approximate location of the Pseudomonas syringae pv. tabaci-resistant target gene, which lays a foundation for the next step to achieve the accurate localization of the Pseudomonas syringae pv. tabaci-resistant gene.

[0048] After the influence of gene sequences corresponding to each primer pair on a disease resistance phenotype of an N. tabacum plant is determined, a Pseudomonas syringae pv. tabaci-resistant N. tabacum plant with a short WZ introgression segment can be quickly screened out through molecular marker test results.

[0049] Optionally, the multiple primer pairs include a KASP-5.1 primer pair, a KASP-10.6 primer pair, a KASP-29.9 primer pair, and a KASP-42.3 primer pair. The combination of the above four primer pairs enables the rapid screening of a Pseudomonas syringae pv. tabaci-resistant N. tabacum plant with a short WZ introgression segment. Specifically, when tested as positive by a KASP-10.6 primer pair and a KASP-29.9 primer pair and is tested as negative by a KASP-5.1 primer pair and/or a KASP-42.3 primer pair, an individual plant exhibits prominent Pseudomonas syringae pv. tabaci resistance. On the contrary, when tested as negative by a KASP-10.6 primer pair or a KASP-29.9 primer pair, an individual plant exhibits Pseudomonas syringae pv. tabaci susceptibility.

[0050] The features and properties of the present disclosure are further described in detail below in conjunction with the examples.

### EXAMPLE 1

[0051] In this example, a preparation and DNA extraction method for a plant material was provided, including:

[0052] A first parent plant (T6, genotype: WZWZ, Pseudomonas syringae pv. tabaci resistance) and a second parent plant (Y87, genotype: wzwz, Pseudomonas syringae pv. tabaci susceptibility) were cultivated and hybridized to obtain an F₁ seed (genotype: WZwz).

[0053] The F₁ plant was cultivated, pollen was collected from the F₁ plant and pollinated on emasculated Y87 flowers at a flowering stage, and a BC₁F₁ seed was harvested (genotype: WZwz: wzwz=1:1).

[0054] The BC₁F₁ seed was sown, tobacco seedlings were numbered, and leaves were taken for DNA extraction. DNA was extracted by the CTAB method or the DNeasy plant 96 Plant Kit (QIAGEN).

### EXAMPLE 2

[0055] In this example, a screening method for a plant with a short WZ introgression segment was provided, including:

[0056] KASP genotyping was conducted. A Pseudomonas syringae pv. tabaci-susceptible N. tabacum variety Y87 served as a Pseudomonas syringae pv. tabaci susceptibility control A Pseudomonas syringae pv. tabaci-resistant N. tabacum variety T6 with a long WZ introgression segment served as a Pseudomonas syringae pv. tabaci resistance control. A KASP-5.1 primer pair, a KASP-10.6 primer pair, a KASP-29.9 primer pair, and a KASP-42.3 primer pair served as primers. DNA of N. tabacum to be tested, DNA of Pseudomonas syringae pv. tabaci-susceptible N. tabacum control, and DNA of Pseudomonas syringae pv. tabaci-resistant N. tabacum control served as templates.

### KASP Genotyping Method

[0057] PCR system: 2×KASP Master mix: 5 μl, primer pair: 0.7 μl, and DNA: 5 μl.

[0058] PCR conditions: 94° C., 15 min; (94° C., 20 S; 61° C. to 55° C., 60 S) 10 cycles (decreasing by 0.6° C. per cycle); (94° C., 20 S; 55° C., 60 S) 26 cycles. If fully clear genotype clustering information was not available after the initial KASP thermal cycling, 3 cycles of (94° C., 20 S; 57° C., 60 S) were added at a time until clear genotype clustering information was available. After the thermal cycling was completed, a reaction plate was read using a microplate reader FLUOstar Omega SNP with an FRET function. The data were imported into the genotype clustering software package KlusterCaller™ (LGC) (www.lgcgroup.com/software) and subjected to graphing and genotype clustering analysis.

[0059] The primer pairs were a KASP-5.1 primer pair, a KASP-10.6 primer pair, a KASP-29.9 primer pair, and a KASP-42.3 primer pair. The reagents used were purchased from LGC.

[0060] An N. tabacum plant with a genotype tested as Y87 by a KASP-5.1 primer pair, an N. tabacum plant with a genotype tested as heterozygous T6 by a KASP-10.6 or KASP-29.9 primer pair, an N. tabacum plant with a genotype tested as Y87 by a KASP-42.3 primer pair, and an N. tabacum plant with a genotype tested as heterozygous T6 by a KASP-10.6 or KASP-29.9 primer pair each were screened out.

[0061] T6 was flue-cured tobacco with a long WZ introgression segment (genotype: WZWZ), and Y87 was flue-cured tobacco without a WZ introgression segment (genotype: wzwz). KASP-5.1, KASP-10.6, KASP-29.9, and KASP-42.3 primer pairs were used for test. If an individual plant was tested by the KASP-10.6 primer pair and/or the KASP-29.9 primer pair to have a heterozygous T6 genotype and tested by the KASP-5.1 primer pair to have a Y87 genotype, indicating that, in the individual plant, a chromosome segment where the KASP-5.1 primer pair was located (namely, a sequence shown in SEQ ID NO: 1) was deleted. If an individual plant was tested by the KASP-10.6 primer pair and/or the KASP-29.9 primer pair to have a heterozygous T6 genotype and tested by the KASP-42.3 primer pair to have a Y87 genotype, indicating that, in the individual plant, a chromosome segment where the KASP-42.3 primer pair was located (namely, a sequence shown in SEQ ID NO: 2) was deleted. A plant with the deletion of the chromosome segment where the KASP-5.1 primer pair was located alone, a plant with the deletion of the chromosome segment where the KASP-42.3 primer pair was located alone, or a plant with the deletion of both the chromosome segments where the KASP-5.1/KASP-42.3 primer pairs were respectively located was a plant with a short WZ introgression segment. Results showed that 9 plants each with a short WZ introgression segment were screened out from 4,464 BC₁F₁ plants of Y87×T6 (as shown in Table 2). These 9 plants were chromosome-exchanged plants each carrying a short WZ introgression segment.

TABLE 2
Individual plants each with a short WZ introgression segment

| | Genotype | Genotype | Genotype | Genotype | |
|---|---|---|---|---|---|
| | detected | detected | detected | detected | |
| Individual | by the | by the | by the | by the | |
| plant | KASP-5.1 | KASP-10.6 | KASP-29.9 | KASP-42.3 | |
| DNA No. | primer pair | primer pair | primer pair | primer pair | Remarks |
| T6 | Y | Y | Y | Y | Homozygous long WZ segment |
| R0 | XY | XY | XY | XY | Heterozygous long WZ segment |
| 52-8E | X | XY | XY | XY | Deletion of a sequence |
| | | | | | corresponding to KASP-5.1 |
| 42-4F | X | XY | XY | XY | Deletion of a sequence |
| | | | | | corresponding to KASP-5.1 |
| 20-11E | X | XY | XY | XY | Deletion of a sequence |
| | | | | | corresponding to KASP-5.1 |
| 49-12B | XY | XY | XY | X | Deletion of a sequence |
| | | | | | corresponding to KASP-42.3 |
| 23-2F | X | X | XY | XY | Deletion of a sequence |
| | | | | | corresponding to KASP-5.1 |
| 53-5F | X | X | XY | XY | Deletion of sequences |
| | | | | | corresponding to KASP-5.1/10.6 |
| 22-1B | X | X | X | XY | Deletion of sequences |
| | | | | | corresponding to KASP-5.1/10.6 |
| 33-4F | X | X | X | XY | Deletion of sequences |
| | | | | | corresponding to |
| | | | | | KASP-5.1/10.6/29.9 |
| 44-6B | X | X | X | XY | Deletion of sequences |
| | | | | | corresponding to |
| | | | | | KASP-5.1/10.6/29.9 |
| Y87 | X | X | X | X | No WZ introgression segment |

Notes:
Y represents a homozygous T6 genotype (WZWZ), X represents a homozygous Y87 genotype (wzwz), and XY represents a heterozygous T6 genotype.

### EXAMPLE 3

[0062] In this example, a method for screening a Pseudomonas syringae pv. tabaci-resistant plant from the plants each with a short WZ introgression segment was provided, including:

### 1. Preparation of a Pseudomonas syringae Inoculum

[0063] A Pseudomonas syringae strain 59 # was taken from a 20% glycerol tube stored at −20° C. Nutrient medium formula of 3 g/L beef extract, 5 g/L peptone, 5 g/L glucose, and 15 g/L agar were mixed and diluted to 1,000 mL, adjusted to a PH of 7.3, and sterilized at 120° C. for 20 min. The strain was activated on the nutrient medium at 28° C. for 48 h. Pseudomonas syringae colonies with excellent vitality were picked, streaked on a Petri dish with the nutrient medium, and cultivated at 28° C. for 48 h. The resulting mosses were scraped off, put into sterile water, and stirred to obtain a bacterial solution, and a concentration of the bacterial solution was adjusted to an OD₆₀₀ value of 1.0.

### 2. Inoculation Method

[0064] 3 to 4-leaf tobacco seedlings were planted in pots that each were filled with an N. tabacum seedling substrate and had a diameter of 21 cm. When N. tabacum seedlings each had 5 to 6 new leaves, a needle was used to puncture the 3rd to 5th leaves from top to bottom with three points at each of left and right sides of each leaf. The bacterial solution was mist-sprayed on the needle-punctured points with a small handheld watering can. The temperature of an air conditioner was set to 28° C., and the seedlings were cultivated in 16 h light/8 h dark every day. The seedlings were humidified in the first 5 days after inoculation, that is, a humidity was adjusted with a humidifier to 80% or a handheld sprayer was used to spray 6 times every day, and the humidification was stopped 5 days after inoculation.

### 3. Pseudomonas syringae pv. Tabaci Spot Size Measurement and Resistance Evaluation

[0065] 7 to 14 days after inoculation, a vernier caliper was used to measure distances of an outer edge of a yellow halo of a Pseudomonas syringae pv. tabaci spot from maximized and minimized positions of an edge of a needle pore at an inoculation site, and an average value was taken as a diameter of the spot at the inoculation site. Spot diameters at all inoculation sites of each N. tabacum plant were measured, and an average spot diameter (mm) of inoculated leaves of each N. tabacum plant was calculated. Through comparison with average spot diameters of the disease-resistant and disease-susceptible control plants, the resistance of a test variety was determined. When a spot diameter was less than or equal to the average spot diameter of the disease-resistant control plant, a test variety was resistant. When a spot diameter was equal to or greater than the average spot diameter of the disease-susceptible control plant, a test variety was susceptible. Results are shown in Table 3.

TABLE 3
Individual plants each with a short WZ introgression segment
and Pseudomonas syringae pv. tabaci resistance thereof

| | | Genotype | Genotype | Genotype | Genotype | | Pseudomonas |
|---|---|---|---|---|---|---|---|
| | Individual | detected by the | detected by the | detected by the | detected by the | Spot | syringae pv. |
| Individual | plant | KASP-5.1 | KASP-10.6 | KASP-29.9 | KASP-42.3 | diameter | tabaci |
| plant No. | DNA No. | primer pair | primer pair | primer pair | primer pair | (mm) | resistance |
| T6 | T6 | Y | Y | Y | Y | 0 | Resistance |
| R0 | R0 | XY | XY | XY | XY | 0 | Resistance |
| R1 | 52-8E | X | XY | XY | XY | 0 | Resistance |
| R2 | 42-4F | X | XY | XY | XY | 0.22 | Resistance |
| R3 | 20-11E | X | XY | XY | XY | 0.11 | Resistance |
| R4 | 49-12B | XY | XY | XY | X | 0 | Resistance |
| S2 | 23-2F | X | X | XY | XY | 2.74 | Susceptibility |
| S6 | 53-5F | X | X | XY | XY | 1.28 | Susceptibility |
| S1 | 22-1B | X | X | X | XY | 5.55 | Susceptibility |
| S4 | 33-4F | X | X | X | XY | 1.31 | Susceptibility |
| S5 | 44-6B | X | X | X | XY | 1.34 | Susceptibility |
| Y87 | Y87 | X | X | X | X | 3.64 | Susceptibility |

Notes:
Y represents a homozygous T6 genotype, X represents a homozygous Y87 genotype, and XY represents a heterozygous T6 genotype.

[0066] It can be seen from the identified Pseudomonas syringae pv. tabaci resistance of the plants each with a short WZ introgression segment obtained in Example 2 in Table 3 that 4 individual plants each with a short WZ introgression segment (numbered R1, R2, R3, and R4) are resistant to Pseudomonas syringae pv. tabaci. In combination with the results in Table 2, it can be known that a sequence corresponding to KASP-5.1 is deleted in R1 to R3, and a sequence corresponding to KASP-42.3 is deleted in R4. In each of these 4 individual plants each with a Pseudomonas syringae pv. tabaci-resistant short WZ introgression segment, the non-target gene component is partly deleted, and the Pseudomonas syringae pv. tabaci-resistant target gene component is retained. The size of the non-target gene component deleted is analyzed.

[0067] In addition, 5 individual plants each with a short WZ introgression segment (numbered S1, S2, S4, S5, and S6) are susceptible to Pseudomonas syringae pv. tabaci. In combination with the results in Table 2, it can be known that sequences corresponding to KASP-5.1/10.6 are deleted in S2 and S6, and sequences corresponding to KASP-5.1/10.6/29.9 are deleted in S1, S4, and S5. In each of these 5 individual plants, the Pseudomonas syringae pv. tabaci-resistant target gene component is deleted.

### EXAMPLE 4

[0068] In this example, a method for detecting a number of the reduced non-target gene components linked to disease resistance was provided, including:

[0069] Leaves were collected from the 9 individual plants each with a short WZ introgression segment obtained in Example 2, and DNA was extracted and sent to Huada Gene for genome resequencing and bioinformatics analysis. A BGISEQ-500 platform was used for sequencing with a sequencing depth of 10×. Resequencing data was subjected to SNP variation analysis, each chromosome of each offspring sample slid with 50 kb as a bin window, and an SNP site of each offspring was compared with the SNP sites of the two parents. If an SNP site of an offspring sample was the same as the parent T6, the offspring sample was marked as p1. If an SNP site of an offspring sample was the same as the parent Y87, the offspring sample was marked as p2. If an SNP site of an offspring sample was deleted or heterozygous, the offspring sample was marked as a miss. SNP Maker information of each offspring sample of the population was obtained in the bin. A sliding window (with 15 markers per window) was used to find accurate recombination points, and a physical recombination map was plotted for each chromosome of the 9 individual plants each with a short WZ introgression segment.

[0070] According to the physical recombination maps of the disease-resistant and disease-susceptible individual plants each with a short WZ introgression segment, genome sequences of 500 Kb at two sides of SNP where the KASP-5.1 and KASP-42.3 primer pairs were located respectively were determined, namely, sequences shown in SEQ ID NO: 1 and SEQ ID NO: 2 and a gene segment adjacent to a sequence shown in SEQ ID NO: 1 and/or a sequence shown in SEQ ID NO: 2.

[0071] In summary, an embodiment of the present disclosure provides a Pseudomonas syringae pv. tabaci-resistant short WZ introgression segment and use thereof. Compared with a long WZ introgression segment, the short WZ introgression segment is reduced by a drag gene of at least 500 Kb. The short WZ introgression segment can be used for selective breeding of a Pseudomonas syringae pv. tabaci-resistant N. tabacum variety without obvious yield and quality disadvantages, which has promising application prospects. An embodiment of the present disclosure also provides a simple screening method for an N. tabacum plant with the short WZ segment, where a homozygous N. tabacum plant with a long WZ introgression segment is hybridized with an N. tabacum plant without a long WZ introgression segment to quickly and efficiently obtain an N. tabacum plant with the short WZ segment, which provides an experimental basis for the acquisition of the Pseudomonas syringae pv. tabaci-resistant short WZ introgression segment.

[0072] The above are merely preferred examples of the present disclosure and are not intended to limit the present disclosure, and various changes and modifications may be made by those skilled in the art to the present disclosure. Any modifications, equivalent substitutions, improvements, and the like made within the spirit and principle of the present disclosure should be included within the protection scope of the present disclosure.

What is claimed is:

1. A Pseudomonas syringae pv. tabaci-resistant short WZ introgression segment, wherein compared with a long WZ introgression segment, the Pseudomonas syringae pv. tabaci-resistant short WZ introgression segment is reduced by a drag gene component of at least 500 Kb; and the drag gene component comprises: a sequence shown in SEQ ID NO: 1 and/or a sequence shown in SEQ ID NO: 2, and a gene segment adjacent to the sequence shown in the SEQ ID NO: 1 and/or the sequence shown in the SEQ ID NO: 2.

2. The Pseudomonas syringae pv. tabaci-resistant short WZ introgression segment according to claim 1, wherein the Pseudomonas syringae pv. tabaci-resistant short WZ introgression segment is tested as positive for a KASP-10.6 primer pair and a KASP-29.9 primer pair; and the Pseudomonas syringae pv. tabaci-resistant short WZ introgression segment is tested as negative for a KASP-5.1 primer pair and/or a KASP-42.3 primer pair.

3. The Pseudomonas syringae pv. tabaci-resistant short WZ introgression segment according to claim 2, wherein the Pseudomonas syringae pv. tabaci-resistant short WZ introgression segment is obtained by a chromosome exchange, a genome editing, a chemical mutagenesis, or a physical mutagenesis.

4. A method of an use of the Pseudomonas syringae pv. tabaci-resistant short WZ introgression segment according to claim 1 in a Nicotiana tabacum (N. tabacum) plant.

5. A screening method for an N. tabacum plant with a short WZ segment, comprising:
hybridizing a first parent N. tabacum plant with a second parent N. tabacum plant to obtain a F₁ N. tabacum plant, wherein the first parent N. tabacum plant is a homozygous N. tabacum plant with a long WZ introgression segment and has a genotype of WZWZ; the second parent N. tabacum plant is an N. tabacum plant without the long WZ introgression segment and has a genotype of wzwz; and the F₁ N. tabacum plant has a genotype of WZwz;
self-crossing the F₁ N. tabacum plant or back-crossing the F₁ N. tabacum plant with the second parent N. tabacum plant to obtain a breeding population material with the genotype of WZwz; and
using multiple primer pairs to test the breeding population material, and screening out an individual plant tested as negative by at least one of the multiple primer pairs, wherein the individual plant is an N. tabacum plant with the short WZ segment.

6. The screening method according to claim 5, wherein the first parent N. tabacum plant is a Pseudomonas syringae pv. tabaci-resistant N. tabacum plant T6, and the second parent N. tabacum plant comprises any one selected from the group consisting of K326, Yunyan 87. Yunyan 97, Yunyan 85, NC89, Zhongyan 100, Honghuadajinyuan, and Cuibi No. 1.

7. The screening method according to claim 5, further comprising:
inoculating Pseudomonas syringae into different N. tabacum seedlings of the individual plant, and screening out a Pseudomonas syringae pv. tabaci-resistant plant; and according to test results of the multiple primer pairs for the Pseudomonas syringae pv. tabaci-resistant plant, selecting a primer pair leading to a negative test result, and denoting sequences corresponding to the primer pair as marker sequences.

8. The screening method according to claim 7, further comprising:
extracting a DNA of the Pseudomonas syringae pv. tabaci-resistant plant, and subjecting the DNA to a genome resequencing; and
comparing a sequencing result with the first parent N. tabacum plant and the second parent N. tabacum plant to determine a length range of a drag gene with the marker sequences.

9. The screening method according to claim 5, wherein the multiple primer pairs comprise a KASP-5.1 primer pair, a KASP-10.6 primer pair, a KASP-29.9 primer pair, and a KASP-42.3 primer pair.

10. The screening method according to claim 9, wherein the individual plant is tested as positive for the KASP-10.6 primer pair and the KASP-29.9 primer pair; and the individual plant is tested as negative for the KASP-5.1 primer pair and/or the KASP-42.3 primer pair.

11. The method of the use of the Pseudomonas syringae pv. tabaci-resistant short WZ introgression segment according to claim 4, wherein the Pseudomonas syringae pv. tabaci-resistant short WZ introgression segment is tested as positive for a KASP-10.6 primer pair and a KASP-29.9 primer pair; and the Pseudomonas syringae pv. tabaci-resistant short WZ introgression segment is tested as negative for a KASP-5.1 primer pair and/or a KASP-42.3 primer pair.

12. The method of the use of the Pseudomonas syringae pv. tabaci-resistant short WZ introgression segment according to claim 11, wherein the Pseudomonas syringae pv. tabaci-resistant short WZ introgression segment is obtained by a chromosome exchange, a genome editing, a chemical mutagenesis, or a physical mutagenesis.

13. The screening method according to claim 6, further comprising:
inoculating Pseudomonas syringae into different N. tabacum seedlings of the individual plant, and screening out a Pseudomonas syringae pv. tabaci-resistant plant; and according to test results of the multiple primer pairs for the Pseudomonas syringae pv. tabaci-resistant plant, selecting a primer pair leading to a negative test result, and denoting sequences corresponding to the primer pair as marker sequences.

14. The screening method according to claim 6, wherein the multiple primer pairs comprise a KASP-5.1 primer pair, a KASP-10.6 primer pair, a KASP-29.9 primer pair, and a KASP-42.3 primer pair.

15. The screening method according to claim 13, further comprising:
extracting a DNA of the Pseudomonas syringae pv. tabaci-resistant plant, and subjecting the DNA to a genome resequencing; and
comparing a sequencing result with the first parent N. tabacum plant and the second parent N. tabacum plant to determine a length range of a drag gene with the marker sequences.

16. The screening method according to claim 14, wherein the individual plant is tested as positive for the KASP-10.6 primer pair and the KASP-29.9 primer pair, and the individual plant is tested as negative for the KASP-5.1 primer pair and/or the KASP-42.3 primer pair.

The application's sequence listing, which the Patent Office published only in electronic form, follows.

SEQUENCE LISTING (14 sequences)

SEQ ID NO: 1 - DNA, 1000000 bp, synthetic construct
  misc_feature 1..1000000: note = The sequence is synthesized.
  source 1..1000000: mol_type = other DNA
gcagatcaactcgcaaaatatggcagccagatggatattcagcaccaccactttttgtttcacaacaattacatgcagatcaacaaggactaactacacaaagaatagtcccttaaacaacatggaatgaggcagctaacatggttacaagtgcccgttttgtccaacaatcggaagttgcatgcgcccgtggacgaaaactcctttttgtccacgatccatctcattgcgcctgagtgaaaggccaaacatattaattacacattaaaccattttgtactttgaagttcaaagctagaacctcattattaatggaatttcaaaataaaggttttaaaataatagcagaaaaatactttcgactataaaatattaattttggccgcaactaaaagtgatatttgcctaagtatttttattcaacaaccaagttaggtccaatctatttggatgttatgtaaaaattaaaattaataggtgactcctttaagccagaagtttggaaaagctaaataccttattgtagttgtttttaatagagataaccaaaagaggaagtaagcgataaataaacaagctatgaactaaatgcttcctctaatttaagccaagaacagtcgaagtgggcgtttggacacaagaattataaaatttcagaaaaaagagaaaaaaaattaagtaaaaattatatttgaaaattagagttgtgtttgaacatgaatatatttttgggctttttttaaaaaaaaaattatgagttgatctgaagtgaaaatgttgaaaaatagcttttttggagttctaaaatttttgaaaaattttaaaattcatcttcaaatgaaaataaaacaatttatgaccaaacactaatttcaaaaaaaaaagtgaagaaaaaaactcgaaaagaaaaaaaaattatagccaaacgggcccttacaatcacccctaataattcatatgcttggaacgcaaaataaatataagggaaattatcagctatgtctatttataaatagctcaatacaaaaattagccaattgataaaatattactaatattactaagataacgttgttcctcgtatttccttaatcgtgaatattcttctcaataccaacccttactcccatatcaaattcagacctcccagagttcagatcatgacaagcccaaaaggacgggccataaaagttttctgtcaaccaaacgtcttcatcaataaccttacctcgggatatttcatcccaagatgtcatgttgagagaactagaaacacactaagagaaaaatcaaaattgttataaaaataaaaatatttacaaaaagagaaggaaaaaaaacttgtaaagataaaattaaaagtctaatatagaaaaatagttaatttctaagtccccggcaacggcaccaaaaacttattgcggccaaacgcacacgcaagtatacgtggtcgtcaagtaataaagtgactaaaagtcggatgtcgaacccacgagaacttgtgattaactattaactaaattagactatcctaactatctaaacaagaattaaacctagaagtatttgattctaaactaattaaaataaagaaaaataaatagtgaactctgaacaagggaaaaacaaatttttatgatatcaatgtaatgaaaacgatctagggttaagggctatctaacaatcatattgtattcttcaattgaattaactaattaatttatctggtttattggttaacagggttaatattagtcataagaatctgtcgagttcttactcgcatattcaagctaacctaacgcctatatgtctatggagttagaatcaacaagaacgcatttgtaattcctgtaaattaaccaagtaaggcaattaggtatttgtctatcctaaccgcgaatccgctccccgatgcccaggttcaagaacttgctctactcaatcctatatgcaatctagaatttccactttcgagttcaactctaaattcgtagatagtattcaattggtgatcaagcaatcaaataattaagcgcaagattgaataaataaaccaatgtgataaactaagaaatcaaaatcaatattcgaataacaatattcatgaaagaaccacaaccctggaacgtgaagtttagctccacataaacatggtggcaaaacaacaaatcatacaaagaaacataaaaattactaagtttgttggaagaaaagatgaactccagcctccacggcggctctatgctagtattaattcaagattccagtgcttgaaatttgaattatgttgccatgcgtaacaaatgtttatttctttatttttttctaaattttatctttaacgtttctacacataaaatatactcaattaaactcaaatagtatagtttagcattaaagtcacaaaatgtaaggtaagtaatgcattaaaaatatgaaattatattcaaacattaatatttttgtatttcatcaccttatttgctatctcatccatgaaatttcctttccgtcttgtatctagtgttgctaatcacgcttaaaaatgtagaaggtgatttttgcatgtgattctttgagagaaagaaccctattatttgatttttcaatttttattggctagttttggtaaatctataactaatggctagaagttggtaaattgagatttatttgggacatttatgtaagtttccctgaatataaactgttagaaacatatttacgtttattagtttttaagtaagtacgtagttcaacaagaaatttccttacatgtccaacgtcgtttagttattgggactaggggtgtacatggaccgggttggttcgatttttatcaaaaccaaaccaaaccaaaccaactatatcggtttggattgattcggttttgtcggatttttcggattttagttttttttttctttttttgttacatgaaaattattccaatcttactatgttaaagttatagataaagttttgataagtggatatatgtttagtaaatattgaaaaatttgtgtaacataggatctattaaaatattctaatgggataattttcttttagtaatacatgatagttgttttcttagtcgtctaacaataattttcgctaatgtacgttttcaaggttaacacatgagaggatcccaaatatttaaatatttcttagagaaaattcaatataaagtcttaaaaatatatatataaattatatatgtatatgtcggtttggttggggtttttttactcaataccaaacctaatcgtattttttaatcggtttggtttgattttttgatttgatacggtttttcaattaggttttaacacccctaattgggactaggatacttattctcgtattaaatttgagattgaatttatcgaacatttgcttattggtataagattataccattattaattttgtatcaaaatcttaatattatttatcccatataaaatgtgagattataatcctgactatagttctgattatatcccataaagaaggtgagatcattgcatgccaaaatagttagtattattttcttattcataagaaatagatagtattatattttggttcttcagaattaataaaaataattggacccaatgatgtggtcatcgatcagtgaagttgcaaaggaccttgggatattatatttcaaatctcaatagaaagttatttggtattcgtattgattttttaaaggaatccgtaagtatccgattgttgtatttcttttcgaatatgttgcgactccgatttgcctaaaccgaaagtctatcggaaatagtatatttacttttattagataggaataaggctacgcacacattatcctttacaaacatcatttgtgtattatgttggggaaaaaactcagaaatagcaagatttacacatgataattgaaaaatagtcacagttttaaaagtaatcgaaatttggtcacttcttcctgtaaagataaaatttgaataaaatcatcctaaaaattgcaacataatatgctggagatcgaattttttatatatgagatttcagcagaatgtgttgtataatgcgctggagttccaacataatgttggaggacaatacacatgaactccacaatcgaacatattatgctgaaatttttcgtgtgctggagtactaacatattatgcgggaagtttatacataattgctctattatccaacatattatgctggaactttttgtgttttagcatagtgatttttttcaatgattttacaaatattaattattttttaattattagttcgaaaactgactagttcgcgctatttttacattatatttgatatgttgttattgttattgttgtaaagtatgtccaaactgatccgaaaacattgttataaaaaaatattaaataaaataattttgagcaatagcagttgtgcaatgagtatgtcaggcacttttcagatggcatttcgtcatagcccatcacaatgagcccacatgaaatgatcatcagcccaatagacccatctgaacttcatatattagaggaatttttataaagaaaagagaaattttcacaaatcactattgtttagtggttattagctagttgtagctactatttactatattactttctataactatatttttagcttttttagagtgtatttgatgtatttaagttattgtattcatgaatacagtaacatttctaggcgtgaaacagggggattataagttataactagacagatttttgtattcgactgtattcacggcgtgaaacaggggattatagctagacagattattgtattcgactgtattcgacggtattcacgatatgtatttgtgaatacagtaacgtaaatagcacaattcatggtctattcaggtgtttttaaacgaaaagtgaatcaattaatataatagactcctaatataactcaacaaactcaattataacacacagaatttgtatttccacttattaaaaagattctcaaccgaaaaacaccccaaaaacatagcaatctttagataaaatatgctgaataattttcccagccgataaatacaacaaaaacagagcaatctgaatacatatatacatctgaatatataaagtatgttaattaaaaatatatatgaatacattcatggaatacaacgagacagtgaatacaatgaaatacacagaatacagtgagatatattgaaatacaatggaaaaaaagacaatgaaatacatgaaaatacaacgatatacattgaaacacattgaaatatattaacagaaaaatcaagttgctcagccccaaactctgtcgtctttgttcaagaacaaccctaatgtcgtctcgtcgagagagccacgattctgactcgaaacaccactattctttacaattgaagccgccggatccaccgtcagcagtccacaatctcgacggagtttacaagcactgtgggcacaagtagtccgcaactgcggtgaggttgaagcagcatcaatatccagccctcgctcgtcgtaaccgttgcctctggttgttgttgttgttatgctggagaaaatttctatatcggatgattgctcgccagtccaaaagtctttgccggaaaactctaattctaatgctttaccggagagttctgatagcaagatgaaggtggaagataagaaagagaaagagggagaatatatatggggtaggggatggatttgaacgtaacccttccttcaactggatggagaatagagggagaatacattaaacatatcccttccttcaactggatggatttgatgctttgccggagagttctggtagtgagatgaaggtggaagatgagagagatagaggggggggggggggggagagagagaatagatatggggtaggggatacgaaaaatttgaagggataggagaaatttgaggggagagagaaaaataatacaaagcttattttatggcttaagagtaggatgtgaccacaaatagatatttggctataaaaaatcaaaagtgagctatggaatataattttttaaaagggtatttatttgcaataaataaggtatcaacatttgctataggaggtaactattcctaaaggaaaattggcatcctataacaacacataacatgaattgacaattttaaagccttatattaggtttggcaaagatagccccaaactgttaccattatatagccaaatcctaaataaaatactcattatatattctctctcaaacaattggccccaaactgtctgcttccctcctcccccttcttcgcggctcacttctcttcttgttcattgcttccctccccctttctctcattgtatttcttcttatatcttttctctttcgctctcatagtttagcaaaaaaatttgcaaattacgcaaaaacatcattgggatgaaaaggtaaagttgatctcacatcagagaaaatcagaagcaaatactaagagagaacaaatacatttcaactttgttttttttctctcttcttttttttggttagattgaatgagtgggtatgattgaaactggttaagaacacctaaacgaggctacatacaaaatttgagaaagattagaagtgatttagattggtttcaggtaaaagtttagacctaaaaatccaactgggacatatgtatatcacgttgtatatcgtgtacatcagtgcatatcacacacagatttttaaggacgtctgtgtatattacttggtatagcgtgtatacaatacaattgttttatgggcggtcgtgtatattactttcacgaccccaattcctagcaggtcgtgatggcgcctattgtggaactaggccagccaaccatcacattactacacatttgttctaatatttcaaaaatcaataataatcagcacaataagcaattaaaaaatttctctatgtttttaagcaattataatataattcaagagtctaaactaatcccccaagactggagtcaaccgatcatgagcatctaagaaatgaactaactctactaatgtcataataatatatacgaatcaaatactaagtactatatgaagaagagaagtggagaagttgcggacgctggacaactagctcgaaatcccaaacgctgatgacaacgagctcggacgactactgctccgaaccagtacctggatctgcacacaggggtgcagggagtaatgatgagtacgtcaactcagtagtaatgaaaacaaatcacagtctgaagtgtatgaaacacacagcacaaaacaccaatctacaaaatagtaaaacttcaagtctcaatacaatatacataagtttgaaaacccgtttccatgaaatcctttgaaacaagtatattttccaatatttcttagtaaaactctcggtaaaatcagtttgaaaaatgaagtgaatcatagtcaaaaactcagtaaatatcatcataaaactgcccctcgggccataatcatcactcattacaatttccctcagcacctcaccatcactcagtatcagtaccgcgggcaacctcactgtcatcatgtctcccaatcactcggcactcgcactcagtaggtacctgcgctcactggggtgtgtaaagactctggaggggctcctacagcccaagcgctataaacaagccacatcatggcataaatcactctcaggaactcagcctctctcgtatcataacatcatcacaacattcgccctcgacctcactcagtcagacactctcagcatgccactcgggccatgaataaaacagggttctcaacccaaaatagtatttcgtttcaagaaatagtaatattatcaaataagagtgtcaacaatttcacaagaaatactgagtgtaaaatcatagttttaaagtgaggaatatcagtaaaatagcccccaaagggttaaacagatcgacactaggccccaaacatggcttacagcccaattatatcaaatcatagtagtactatagagaataagctttaaaagtaatttctcaactcaatagttgcctaaaaaggtacattttttcaaattcccaattcgtgcacgccccatactcgtcatccagtgtgtgcgtcactccaaatccgtgaaaaaatgtaaagtccggcgtttgataccctcaggacaggatttaaagacattacttacctcaaactagcccgaaaagctactctgcaacccacttgcctctcgaatcaactttcgagtgttccaaatctataaagatcatatttttctcatcaaattatgctaagggaatgaattccaattgaaaaatatcaattttagtacaaaatccgaaattagccaaaacccgactctgggcccgcatctcataactcgacaaattttataccaaattgttcttcatcatctcacgagtctgtacatataaagaactctaaaatcggagttcgtttgacccctcaaatcatccctaaaaggtctcataatctcaagccctaacttcacccttttctactgattttcatgaattaaacactgataatttgatccttaatcacatataatcgagttttaggtccaaaatccttacctcaatgaagaacaatgatttcctctcttacaaatcgcctcaaaagcttcttcccgttcaaaaatggaggaaaaatgggttatggtcgcggagggttttaatttatacttcccaggtccggacactgtgcgatcgcggatccaggagtgcgtttatgattaaaaaaaattaccgtcccttatttaaccctatgcgatcgcggccttctatacgcgatggcatagaacgaattttccaacagccttctccaactcttccagatagcctctagtataatggtcataaccttttttacaaaactccaaattacaattggattaactttcttaaaactagacatcacgagctacaactttcatttttggatcatcttcaaattccttatagattgtgagttataagcttccaaagttgggacagtgcaatagaaattttactctatgcgatcgtgggaagacttatgcgatcgcatagcacaactagatttttccaaaattttctctgtgctaatgcttccagatcaatgctatcgcattgtacacccctgaaaccaaaaaccagcaacaagaaatggcctagaaactcaaaactcacctgagaccctcgagacctcagccaaaacataccaacacatctcataacatcacacaaacttagtcgagccttcgaatcaccaaaaacaacgcaaaaaaaaacactaaatcacatcgaattcaagcctatgaactttaaaatttctaaattccaccaatgatgccaaaattatccaaaactcatcagattgacctgatattttgcacacatatccaaaatgacattacgaacctattccaactttcgaaattccattccgaccccgatagcctattttccaatgccgaccggaaatcgccataaactaactttcgccaattcaagcctaattctacagcggacatcataaaaatattctgaacacactcctaagtcccaaatcacctaacgaagctacccgagccataaaatccgcattccgaggtcgtttaccaataagtcaactctcagttgatttttccaactataaggctatttttaaagactaaatgactaaattctcactacaatcattctgaacccgatccaaccaactataacacatcataaacagtaataccaacctatgacaaggcaataacatcaataataatgcaaattctacagaacgaccgaccgggttgttatattctcccccacttaaacatatgttcgtcctcgaacgtgcccagagttgttccaaacaccaccaaaattgttgtgtaacctaccatgcacatattcggaggtgattccacgtcaccttaccctcagataaaatcttatctgagggaaaaagagtgcaacgcatgctttaaaacctaaggtcttcgatctggagggtgcttcgattcctctcaatcgaacgcctgcacataagttagtataaatcttaaatgaaaatggggagggttgtaccttaatgatggtagcattcgagactcgatatgcttcaattgctcattacgagtacatgacacggttttttattcgttcattcgagtgcagccgagaatgtagtttgtgattgctacttggctgtttgcttgtcctttggctcctttgatgtagaaggcgtcgatgtcggtgccacatcatgcaccgcgaacatctatcttgttgcatgttgctccccgtacactatttttattctgtcttttgttggaaacttcatcatttgatgaagggttgacgtcactgctcttatgcagtgtatccacggccttccgagtaaggcattatacctcatgtcaccttcgatgacatgaaacttagtatcttgaattgtgccggccacgttgaccgagaggatgatctctcttttcgttgtctcgctcgccatgttgaatctattgaggactcaagaggcaggcacgatctggtcgagcagcccgagctgttctaccaccctcgacctgattatgttggtcgagctacctggatccacaagcacacgtttaatttgaaatttattcaaaagaaaagaaaataccaatgcgttgttatgaggctgagacattgtctaaaatgtcctcttcgctgaatatgagagcgtcctcgggtacgtacttcgagttcgtttttccctggtgatggatatttttgttcgtttgacaatgggttcatgtgggacgtcaattactccaatgatcgtgtggatgacgtgttgtggttattatgattcatttttcatgttcgcctctctttctcgaaattggtttttagctcggtccctgaggaactctcgaaggtgccctttgctgatcagttgggccacctgttctcggagctgtttgcaatcctcggtcttatgactgtgggtgatgtgttattcgcatatcaagttagggttcctttgcgaaggatctgatagtataggttttggccacccggtatcttttattttacctatggctgacacggtgtctgaaacatcaatgttgaaattgtagtcagataactggggtgcctccaccggccctatgtgcctatcgaacccggcattgttcacgagtcctcaaagattctagcctcgatccatccttcgatcgtttcgaggtatattgcgcctcggcggtttcttcggtcttcggtgtacaatttgtacctttccttgctcggcttcggttctctctctggaaacccttcgctaagagcctactaggatacagtgagcccgagggggctcccaattagtcgtcctcgatcctgatctttgactgataccggttgtggacatcccgcccaagttacggcgggatattcaaccaagttctgcttagctgcttcgaagctatcatgctccgttcgttcaagcccttagtgaaggcatgcacttcctagtcatcggagactggtggtaatttcattcgctccatttgaaagcaagatacaaattcccttagcatctcgttttctctttgtttgattttgaagacgtcggacttccttgtagcgaccttgatggcaccagcgtgtgcctttataaaagagtatgccagcatggcaaacgattctattaaatttgggggtaggttgtgataccacatcatgaccccctttgatagtgtttctccaaaaaaattcaacataacggattcaatctcgtcatccttcaggtcatttccttttacagcacaagtgtaagcagtgatgtgctcattggggtccgaagtcccgttatacttcgggagatcgggcattctgaatttcttcgggatgggatttggagccgcattagatgggaatggcttttgcacgaacttctttgaatctacacccttcagaatcggggttgcgcccgggatctgatcgaccctcaagttataggtctccagctttttgtcattagcttctataaatttttctcctgattcaattcttttagcaaggtcctcgagcatattcattatagaggggtctgttgctcacctgttgttgctcgatctctctggtgcctactcgactcgaggagccgtttctggcggtgctatgctttgagttttttgatggctttgtagctgagcaatagccacttgttgtgcctgtaacatctcaaaaatgacttgatggttgatttcccattcctcccgagcaggagttctatgcacttcatgttggtctcctccacgcacgctatcatttgtatgagagattacgttgacgtgttgagcgttgcgtgtaccaatatcgaccgatattggagctggtgtcaccccagggatttgtagtggtacaccagcgcctgaagcagcttcaccattttctctataaagtttaatgtcgttgttttcgtgtgcattcaatgagttagatattttttgacattaaatcaaagggtcttggacaagaaaaagtgtgaaagataacttatgttttcaaaaaaccagcactaaaacaatcactattatttttagccccacggtgggcgtcaaactgtttaccttgaaaatggtaatgacaattatatttgattttgtggttctgaaaagacgtaatttattttaataccagttgtttagtcaataatgctaagtatgaataagaaaagtgtgataataataataaaggaaagtggtgatatgcaaaccgaattgttgtgagacggggcctcgaggtcgagctagaatgcttaataggggacggtcgatgaagaaataacagtgtggagggactcgaggatagcccttttatgataaaaatgagaaatgaatgaagaacaaataatgaacacaataaatggaaagcaataaatcagtggaacaatttttagacacgttcgaataagagaagcagagaatgttcttgttgttgtattgaatatcatgtattttataaaatgacaatggtcccctttatataggaggagggaaccccaatatagtacatatataattatcatgttttaaaaggcgtgggcgtaaggagaggcgttatacatatgtctcagcgagacgtaagtcccgaggcatggcgcgtaagccccataggtatttaatttttaatattttataaaataatataattacagtaaatatttataaacatgtaaaattgcataaaaatgaagaaaactatatatatatatatatatatatatatatatatatatatatatatatatatatatatatatatatatatatatatatatatatatatatatatatatatatatatatatatatatatatatatatatatatatatatatatatatatatatatatatatatatatatatatatatatatatatatatatatatatatatatatatatatatgtgtgtgtgtgtgtgtgtgtgtgtgtgtgtgtgtgtgtgtgtgtgtgtgtgtgtgtgtgtgtgtgtgtgtgtgtgtgtgtgtgagtgtgcgcgcgcgcgcgctttaccccacaaaaaactagtcaaagcaatctattatacgctacttagaagctcaagtaacttgagtcgaaaagaataaagttttctacatggaggaacaaaaaggaagactaacctgcaatttgaactctgaacttgttgatgaaggagaatggaattatctttgtatttgttaagaaagttgaatattcgttgcttttgagagatattagcagactagcggacaagataaagaattgggaaaggccatgaattgggacttcattaccaagctgaattcgagaatttaggtattatatgaaggacttattcaacaaattttgttttaaattgaatttttttttaaatgcgcctcaaacgcccgggcgtacaccccaaattgcggggcatacgcctcttgagactttgtaacaacccgaccggtcgttttgagctctagcgcgtcgttcaacggttggaagtcatgaacaacttcatttcaggtataatgacttgtgcatatggtcggagttgcgattcaggaacttcggagtcaaattggaaagaaaattctcatttcgaaagccttaagttgaagaaattgactaagactgaaattttgagtaaacaacctcggaatcaggatcggaaggttccagcatgttcgtatgatgatttcggacttgggcgtatgtccgggtcgggttttggataacccgggagcatttcggtgtatattgtggaagtcagcatttttgaaggaattttctaagtttggctggaaggcatttcagtgttatagatgtccgtttgggattccgagtctgggaatagctccgtatggtgattctgtagttgggagagcgatcggaagtgaattcggatgtccgtaggttattttgaagtcatttggctaaagatagaaatttgaaggttttgaagaatccgaccgaaagtggaaattttgatatcgaggtcggaatgcgattccggaagttggagcaggtctgtaatgtcgaatatgacttgtgtgcaaaaatatgaggtcaatcagacgtgatttgataggtttcggcatcgaatgtagaggtttaaaatttcaaagttcatcaggtttggattggagtacgattcatggtttcggcgttgtttgatgtgatttgagacctcgagcaagtccgtggggtgttatgggactgagtcatgtgattggacggggtaccgggggcctcgggtgtgtttcggggtggtttcggatcatttcgggctgttttgagatggctattgctggtgtctcgtgttgtttttcgcgttcgcggggaccccttcgcgttcgcgaagaagaaattggcatcagagactttgctctttgcgttcgcgaacaatgcctcgcgttcgtgaagaaggaaattatctgttgcgcaggtctgatttcggaggctcatatctcacattctataaggaattttgagatgatataaaaatgaaagttgtatccctttatgtctagtttctagaaatttaaaccattagtcatttggagttttatggaaaatgttatgattattctactagaggctggttgagaagagtaaatagggaacctggaatttttgttctatgcgttcgcagtggtataccgcattcgcgaagagtaaatgggggagctggattttggttctatgcgttcgcggcgaggtaccgcgttcgcgatgaagaatttacctgggcatatttaattaaaccctccgcgacctaaaccttttttacaccatttttgtacggacaaagagcttttggggacgatttttgaagagggaaatccttgttcttcatagaggtaagtattttgatcattaaaactcgattatgggtgattatagaacctaaaaccagtgtaaattcatggaaaatcattagaaaaattgggttttagggcttgagattatgagaccttcaagggtcgatttgagaggtcaaacgaactccgattttggtgttccttatatgtacagactcgtgagagtacaaagaacacttttgtataagaatttctgagtttcgggatgcgggcccgaggggtcgagttttgaccgaattcggatttttgagctaaatttgatatctttcgattggaattgttccttaagcacatattgatgatacaaatataaacttggtagatttggtgacttcggaggtttattcgagaggcaagcgcattgtggaataattccgggctagttttgaggtaagtaatgtcttaaaatcctgtcttgagcgtatgaaaccccggactatgcaccctttcacgggttttgagataaaaaggtggaaacttcggaacatatttcctacttaggcgactattgagttgtgaaaccgatttttaaacctttgcttaaatagtatttatatattatgatatgttttgggctgtaagccatgtttagggcctagtgccaatttatttaccccttgggggatgtttttactattttcctcactgatatgttatgatttttcactcactcttttatgtgaaattgttttgacactcaaagtattttgatactatttatgtaaatttttgggtcgagaacccaatatattatggcctgaagggaaaattgatagtgtctgactgagtgaggctgctggcctatattgtgaggatgttatgatataagtgaggctgctggcctacattgtgaggatgatatgatatgagtgaggttgcgggcctatattgtgtgtgatttatgccatgctgtggcttattattgcgcttgggctgtaggagccccttcggagtctgagtccatttccagtgagcgtcggagaggggaggaggcttccaggacttatgagtgatgtgaggaggcttccaggccttatgttattattgcgcttgggccgtaggagcccttctattgtctgtaacacaccctcagtgaacgtcggtaccgaatgagtgatgcccgcggggcttatgaagagtgattgtgaggatgcctgatgggcagagggactgtgaggatgcctgatgggcagagcgactgtgaggatgcctgatgggcagagcgactgtgaggatgcctgatgggcagagatgggcagagcgactgtgaggatgcctgatgggcaaagtgattgtgaggttgcctgatgggcagagtgattgtaaggatgtctgatgggctgatactgaaaaatattattacgagaaatgattatggcccgaggggcagttttatgaaaggttttactgagttttcaaactatgatttacttcgttttcacactggttttactgagaattttactgagatatactgatattgcgcttgtttcaaaggttttctggaaactgatttcgaacttatgaaattgatgaatgttacgtggtgacttggtgtttttttggtttgtggaattgtgtacatgctctgtgtgtttatattactcagactgtgatttattttcattaataccgagttggcgtactcataaaggctccctgtgcctctgtgcacagatccaggtactagttcgcagcagtagctgacgcagtgtggtagcaacattttcacaggatttcgaggtagctgtccagcgtccacagcttctccatttcccttccttatttagtcttagcatttgattcagagacatatatatagttttagcagagttagatttatttattcttagatgctcatgactattgactccagttcttgggaggtggtttagaatattatggggacgctaagacttatttatattatttatgctatggttgcttgctgattatctaattgtgaactgttatgattgaacaaaagcgtagtaaagtgatggtcggctagcctagttccacaataggctccatcacggcctgttaggatttggggtcgtgacaagttggtatcagatctctaggttacataggacttaacggtcatgagcaggtttagtatagtcttgcggatcggtacggagacgtctgtacttatcttcgagaggctgcaaaacccttaggaaacattccacattcttgaattcttatcgtgcgaatccatttattcatccaaaagcgtaactctttgaattcctttcatgtattcgaatgcgcacgcgagcgcttggtatcagttgtgcgtcggcggcttgtgacttccatgggtgagatatgattttaacatgttaataatgggccagtcggaaggacttgaagccggattttgtatgtggcttgagtactgagatttcatttgtttgagcacatgtattgggggacttatatgtttgtggtgtccttattgatgaaaccttgtgactagatgactacgtggtgagtgtgcttgacagttagatgtgttcaggttgtttgattgtgacaaaatgaattggcgggagatgtggcaagaaccattgattatttgccttctgtattgagttataatatgggttcgagttatgagtagtgaaggacctctcatgtagttagttgtggagtgaagtgggttttcctgttatgttctaatatcccgatgatgtcttttgagttgaccaatgctccagtagcattcatgtatttgactgccggtgtattcagtcgtattataactccttttttattgtatttattgatggaatcctgtcgtactctagaagccagggatagcatactcggcatttgatgatggtattacaaggatatagggaggagaaggtggtgcgaagttctccaagtgtgaatttttggctcagttcagtagcattcttgggacacgtggtgtccagtgaaggtatctatgcggtcagatgagtgtgagtagagcttccagaagcttaagaattccttgaccacagcccagtgttagtattgccatcaacttcaggttcttataccgctaaatgggatgtcttgggggcagacagtggtcgtgttctaatgtaggaaggtatagtaattgtgtgatggatatgattttcagaagtgtatagggagataacattttgagattaagcaggtaggggtatatcctgcgggttgtcttgaggtatatgacccttatgtttatctgtagcaagttcttttctaccagtagatgatgcatgttgtaatttgattttagctcgcttgtgggagttggcatgatcattacaatggtgaatgcgagatttgcaaacgagttgagggttagatggtctgggtcatatgagcatatgaaggatttagttgaatcccaccacagtatgttggcagtgataatgtgtgggcatcgtgagttattgtttttctggatctttggctttgagctaagtgggggagtcggctaacgataagttgattacacgattatgtgttgtattggttttggttcgaggtatgttggtgaatcagttatgacctacagaggtggagtctgataatgactcgagtgatggaaattcttctatacaggttgtaacgtactttacggagagtggaattcattaaatgatggagttgtaatagtaagtgtagagtgtgcaatgtatgagtgtgcttgttacttcaatggtgtggattaatttcctagatgtggattgcaagcggggtcaggtcgttctatttacttggttagtgtaattgaaattgcatagagcaaatgacgtttgaaaatggttcagacggattcaaggttatatgtagagatcgaggatcttcaaagtgtgagaaggtgtagaactgagatttacggggaaggtgtcaaggcttgtggtgtatttgcattatcatggattctatccatcattatcaggaaactgaaggtaatgactttaaattcacaggaagtctctttagggtaagtatttctaatgtggtgctttggggatatttgagagagtattcagcggcttatgatccttagacggtatatttttatgctcgggtttcgtgcggtgagtcgggattgagaattgcggtattatggaaagaagaagtatcaatttgaaggtaagtcaggaggaacttggataaatagggaagtttggtagtaggtcatatcggcatgataaggtatatggttagttctttaggtgtttatgaagtactgagttgttacatgtatttcttagcaattttcttagaattttatggcatgcatagcttggttgagttagacggattcagtcctggcggtttggtgttgtacaaatgtgattcgggagtttttgatgatttctacaatggttagagatgtatattttctactggcgtgagggtcatatgatgtatggtgactttgcttctaaatgggataaatggaaagttcttggctagttgggtacgtagttgtttgtggctaggaagggagcatgaagttctcatatttatcataggatgcatggtgtatgcagtattttgtgtatagtggagagtggcataggtgaggtcacggttcagttttggaaggaaggtcagaactggcagtttcagatgattaggtaaaggataccactattaggaggctggatgagagtatacattcataaaggacaatttgcttaagacaatgtgtttgagtaagggtgcatcattggtgttacaacgctctcttgttggatcgactatcgatagtcaagtttgtgggtggcacagaataattataggagtatccccatggaatgattaagtattagagacatgttatatggttgagtggtggaattgggatcagatatggcaattggtgcgcctcatggattttgatacggagagttttcatgaacattgtagttgtgaactacgaggatgcgagcaaagctagtcaggtgttagtatatgtcatgattcagtcgttatgaacgttcggagagttatctacctgttgtgggtgaccagagttgacttagagttattggtaggccagtatgggtgttgcaggattgagacgtattggttatgttctttctggttcaggtggcatggcatcgtccgattttcccgtggttatggcaatgcactctgagtaattgatgtctaatttcacatggttattgattttgagcaaggtggcttggagtatgtcatgtggtccagcggttggatgggatcacgctttgcagctcagttaggtagaggtatgatccttggtgtcggatttgtgcgatatggtttcacgatgtgtatcaggcttttagcatgatgtggtaatggcaagagaaatggcaggatagtcctctcgtgtgagtcttctctattttatgaattgagctcttaggatgttgttattgagtgcacgagttgcacaggtatggctatggatggtattgatgctgagcgggcaaatggttgatggtttctacgtgtttctttcatcatcggcaccatatgaaggtgttaaagcaaggcattgtttgataagaggttatttaccggtgttgggttgttatgagcagcgattgggattatgagtcatcgctatgagtgttgagtcatgcggtatattatatgacttcatcttgtgttgcgtatatggcttgatacagtgtgttcagactatttcagcttatagttgtgggattagaacttgtaaatcattccagaggtggaaatttagttctaaggtttatgggtcaggaccggacttcaaaatttcaactatgttgtgctattagacctatatggggtaaggtgacattgaatcacctccgaatatgtgcatgataggttacacagcaattttggtggtgtttggaacagttcttggcacgttcgaggacgaacgtctgtttaagtgggggagaatgtaacgccccgaccagtcgttttgatctctagcgcgtcgttcagcggttggaagtcatgaacaacttcatttcaggtattatgacttgtgcatatggtcggagttgcgattcaggaagatcggagtcaaattggaaagaaaagtctcatttcggaagccttaagttgaagaaattgactaagactggaatttggagtaaacgacctcggaatcaggatcagaaggttctagcatgttcgtatgatgatttcggacttgggcgtatgtccggatcaggttttggataacccgggagcattttggtgtatattgtggaagtcagcatttttgaaggaatttcctaagtttggctggaaggcatttcagtgttatagatgtccgtttgggattccgagtctgggaatagctctgtatggtgattctggagttgggagagcgatcggaagtgaattcggatgtctgtaggttattttgaagtcatttggctaaagatagaaatttgaaggttttgaagaatccgaccggaagtggaaattttgatatcggggtcggaatgcgattccagaagttggagcaggtccataatgtcgaatatgacttgtgtgcaaaaatttggggtcaatcagacgtgatttgataggtttcggcatcaaatgtagagggtttaaaacttcaaatttcatcaagtttggattggagtatgattcatggtttcgatgttgtttgatgtgatttgagacctcgagcaagtccgtggggtgttatgggactgagtcgtgtgattggacggggtcccgggggcctcgggtgtgtttcggggtggtttcggatcatttggggatgttttgagatggctattgctggtgtctggtgttgttcttcgtgttcgcggggacccctttgcgttcgcgaagaagaaattggcatcagagactttgctcttcgcgttcgcgaacaatgcctcgcgttcgcgaagaaggaaattatctgctgcgcaggtctgacttcggaggctcatatctcacaatctataaggaattttgagatgatttaaaaatgaaagttgtatccctttatgtctagtttttggaaatgtaaactattagtcatttggagttttgtgggaaacgttatgactattctactagaggctggttgagaagagtaaatagggaacatggaatttttgttctatgcgttcgcggtggtataccgcgttcgcaaagagtaaatgggggagctggagttttgttctatgtgttcgcggcgaggtaccgcgtttgcgatgaaggatttacctgggcatatttaattaaaccctccgcgacctaaaccttttttacaccatttttgtacggacaaagagcttttggggacgattttgaagagggaaatccttgttcttcatagaggtaagtattttgatcattaaaactcgattatgggtgattatagaacgtaaaaacagtgtaaattcatggaaaatcagtagaaaaattgggttttagggcttgagattatgagaccttcaagggtcgatttggggggtcaaacgaactccgattttggtgttctttatatgtacggactcgtgataggacgaagaacacttttgtataagaatttctgagtttcgagatgcgagcccagggggtcgggttttgaccgaattcggattttaaagctaaatttgatatctttcgattggaattgttccttaagcacatattgatgataaaaatctaaacctggtagatttggagccttcggatgttgattcgagaggcaagcgcattgtggaataatttcgggctagttttgaggtaagtaatgtctttaaatcctgtcctgagggtatgaaaccccggactatgcaccctttcacgggttttgagataaaaaggtggaaactttggaacatatttcctacttaggcgactattgagttgcgaaaccgatttttaagcctttacttaaatggtatttatatattatgatatgttttgggatgtaagccatgtttggggcctaatgccgatttgtttaccccttgggggatgtttttactattttcctcactgatatgttatgatttttcactcatttttttctgtgaaattgttttgacactcaaagtattttgatactatttattgaaaactgaaacactgtttttgggtcgagaacccggtatattatggcctgaagggcaaattgagagtgtctgactgagtgaggctgctggcctatattgtgaggatgttatgatatgagtgaggctgctggcttacattgcaaggatgatatgatatgagtgaggctgcggacctatattgtgtgtgatttatgccatgttgtggcttattattgcgcttgggctgtaggagccccttcggagtctgagtccatttccagtgagcgccggagaggtgaggaggcttccaggccttatgagtgatgcgaggaggcttccaggccttatgttattattgcgcttgggccgtaggagcccctccgttgtatgtaacacacccccaatgagcgtcggtacagaatgagtgatgcccgcggggcttatgaagagtgattgtgaggatgcttgatgggcagagcgactgtgaggatgcctgatgggcagagcgactgtgaggatgcctgatgggcagagcgactgttaggatgcctgatgggcagagtgactgtgagggtgcctgatggacagagtgactgtgaggttgcctgatgggcagagtgattgtgaggatgcctgatgggctgatactgaaaaatattgttacgagaaatgattatggcccgatgggcagttttatgaaaggttttactgagttttcaaactatgatttacttcgttttcacactggttttactgagaattttactgatatatactgatattgcgcttgtttcaaaggttttctggaaacttcgcagcagtagctgacgcagtgtggtagcaacattttcacgggatttcgaggtagctgtccaacgtccacaacttctccatttcccttccttatttagtcttagcatttgattcagagatatatattatagttttagcagagttagatttatttattcttagatgttcatgactattgactccagttcttgggaggtagtttagaatattatggggacgctaagacttatgtatattatttatgctatggtgcttgctgattatctaattgtaaacttttatgattgaacaaaagcgtagtaaagtgatggtcggctagcctaattccacgataggtgtcatcacggcctgttaggatttggggtcgtgacagactttctccccacaccatcgccccagggcttgccccgaaaatgccttttaaaacactgataattattacagagaagaacaactggtacatctatttaatgacttagtacgaacttgtactattcttgcagacttggtcaactctagccacgtgcccttgggaattttccgtcttcttatgatggtccccgatttgtactgctccgaggtcgagtacgacgagccttcaatatgcttcctcgaggaatgtacctcgggtcaaacaatgaatgccgttctgatcttctcggggtcagtcatggagtgccacatcggtctccaaatcggactcccccattttggtcgtatacacatttttaatttaatttcaaaaacataaaatatatacgaaaaaagttctgatatgaaagaaagatatttgactttccaaatagcaatatacaagatggaacagaaggataacagacttcctttccaatttatatatcttgtcctcatccaattcaagaaaccaaacaattaaacaaagagaaaggaaacctcgttactttttggtttttggaaaactaccgaaaatggtattgagttaatttactcctattatctcataattatcttcttatttcatttgtcgagtatttaattttgatacattttaagattaaattagaataaattgaatcatgatttaagaaaaaatacatagaaattatgtaattgaacaagaaaatgttgctttaaaattaattaaattcacataaagaattcctctctctatcgcattatacgtggctggcgcactttcctttttaatatctcaaaaagaatgaattttttttatttagaaatagttataactttaaacttgttagttgctttttcttgaatatcctcctcaattattttcacattgtcgccataaatataattttttcgctcttaataaaatgtatatatattattataaaaaatcgcttctctccttaataaattttacgcgatacaatataaattaataagaataaatataagtatcgaatattggacggaaaaaaatactattggccagccgccatggccacttccacttgcaagtggcatccaaagagtgtccccaccacctttgaggtctctatcaaataatcctcttgccaatatatatgaacttttttcactttttacttttccttttccttttttacctttctttccctcttgttttgtacaattttatttctttaccattatcatattctcctccttttttattataaaaataattagaagcaaaaaaggaatttttttaggacattaactctttttcattttttttaaagaggtgatggatcgtaaatagagaaaataataaataaataaaaagagtaaaaagaattctttggtgatgtttgaaccttacatctaaataatgtaggacatcattgtttcttgatgtgtatgttggatatattttgtaaaacattacaaaaaagatgatgtaacatgtaatattaaggcattaatttttaggataataataatagtagcaacagcagcagccgcagaagcagtaacaaaaatagtaagtattactacgtgaatgtattcacttcgtatacgatatatattgaattaatttactttaaaaagaagagactttattttttcaaagtttataacactaataaatgtatctataattagtatcttaattagagtatatatttttttcaaaattcataaagcaataaaacattacccaaaatgagttgccactctaagagatatgtcaaatctcacaaattattgtttgaaaggaattttccaattttggttatagggacctcaatttgaataacctttaaacataagtttctataaaaatattattttgccatttatgctattccaaagcatttgattctcttaattcttagtgcaaaaatcccttttttattccaagaatgtctccaacctatattgattctaaactaatttctttcctaattccacataactcccactagccaaaaatgtcacatttgtcttttaaaatttttgcacttaaaagaaatatattattagtcttaatagtaaaagtatttacctaatttttccttaaatattttcttaattaacactcgcactattagtaaacatgattatattatttatttttttagaaaaaaaattaacaatttactaccctccaaatctgacgtcatatatattggtaaacatggatgtgtaaacataacaataataattacatctcaatcttaaacaagttggggtcgattatatgaatcgtcattgcttcatttaagcttacctcatgtcatcgtcataccagaattgtgttaaaagaattaaaaaaaattatcactctaataattgaagcattaattatgaatttggaaagaaaataaaatttaaattatattttcttattttaaatcataaaacaacaaatatttgagatcaatattgacataaatgtaactttatccacaaggaccaattacccagaactcaaaaggacaaataccccaagataattacaaaataatattgtcaatttcaccagaaaactacaaaacgatagccccacatctcaagacttcaatgcatttgcatttgttgtaataaaggtcaagggtcacatctctctacccaccctctatcttatccataaacaaaaaaaatttataaaaaaaacttgcatatatttgaaatttacaccaaaattattctgctttataatgattattagtaataaaattgaccttaaaatatgaattaactaattatagttcaataatagtactctatcaagtccactatattgtttttgatactttcacctgcaacttgtttggatggttgttacccattgtaaagtatcgtattgttactttaaatacgatatttgttttgattgttacttaaattttattgtatcgtatcgttaaatttgtcgttacataacgacggaatatgccactttatgtaacgaacgattttggtgtggtcgtgtcgctaccttgtctttttatctcaatctcaccattcattattattaagtaattttatttcacttaccctactttttatattgtaattttatcatgtttcgtaatttttctttatattcttcatatttttggtgtgtgatatcataaaacgatagcaaatgacacgatctattcaaacattgcatttatcaaacaatacattacaatacaatacagtacattatgaaacgatatgttacaaccgttaaaaaaattagttaataggaccccaaggtaagggtgcgtgtaatagacccttgtggcctgacttttcaccattgcattgggctgctcttttttcggagtggccgagtaggttgagcaggggactttccaaacgggaggtctaggtttcgaaatttacttgcataccccttggccgagtcctcgcacgagcattgcctagtgtgattgaccttcctatatggtctgcgagctattatagaagagtgagatttgccatgtgcgcacaccgtgcatgagactgtcatctcacacgactcataagtaataaaaaaaagaaaatataaggataacaactgcggattcccttgttaacataaaaatattagttaataaaattaattacgaatattgcctaagtgacaaataaaaaggatcaaagaaaataacaattttatttaatataattcgtatatttattgcattgatgtaaataaatatacaactcataaaaagcacttcaagcacacactagtgttaaagttttctcactgtttcacacatcaatacaagcaatttcctaactcagaacattaatttttctattaaatatatactcatcaaatgcatctacctcttttcttaattaaacgctataaatagtgatagatttccttcattaatgagttccaattggatagatgagtaatttatttatttcttattctatgcatgggtgttcatggatcggtttgggtcggtttttccttaaaataaaatcaaaccaagtaagtcagtttttcaataatggaatcaaaccaacccaattaagccggtttttttgtttttcggttatttatcagattttttcttaaatatgagatatacactaccaaacgcatatttcagcgactacattttcagcgtaacactatcaaatcaattgttttaccaagatatattgatgataattgaattaaatagcgatgaataatttaagtactcaattaaatatcgattatttttaacataaaataaattattgtatagcaaaagaaaactaccaatcaaaatagaatataaaaggcaaaaaattagattgttataatagcaaaggactagactaagaatacaaatgactaatatgcatcataatttttttgaaactttatataaaatatacatatatataggtataataataaatttaaatagctacttttatagtcggtttggttcgatttctcccgatatttttttcttaaaatcaaaatcaaaccaatttgatcggtttttaaaattcaaaaccaaaattaaaccagacgtaaaaggtaacgttttttttgtcgttttagttcgattttcggtttgatttgatttttcgaaattttatgaacattcctaattctatgttacatagttcatttacatttgtatcaatcaggtataagtaacaagtatattgatattttatactatgtttttaaaatagaataaatttaccaaaatatgtgacatgatcgtgtctaattacccatatttttatctcgtgatctgtgcaaattatctttaagtctttcttccaaaatattagtattgttattcatgatacattaaaatttagtaaaacatcacacgtaactgtttaacgtatttacatatatctttatttgtgcttcaagcgagattttctcttcgatcggtgcatattgacttttgatgtaatctctaaagtctttattccaaatattgatagtgttattcaagtacattaaaaacatagtaaattactacatgtaactgtctaacgtatttacacgtatttttatagcttcaggagagattgtcttcatagtcaacgcaaattatttttcgtgtaagctctgaagtctttcttctcaatattggtggtattatttaagatacattaaaacttagtaaaatatcacacgtaactatttaacgtattcataaatatccttgtatgtgctttaaaagaggttgtctccactatcggtgcatattatttttggtgtaatttcttacgttcttattccaaatattaatagtattattcaaaatacattaaaacctaaaaaatactatacgtaccgtctaatatatttacacatattattatttgtgcttcaagaaagattatctccacgatcaatgcaaattacttttggtataatctcagaagttttttacgaatattggtggtattatttaagatacattaaacttagtaaaatatcacacgtaactgtttaacgaaatcacaaatatccttatccgagcttcaggacgatcaatgcatattggtatttgctgtaatccctgaagtctttattccaaatattgataatgttattcaagtacattaaaatctagcaaattactacacgtaactatctaacgtatttacattgtgcttcaagagagattgtctccgtgattcgtgcagattatttttggtgtaatctctaaagtcttttttctgaatattgatggtattatttaagatatattaaaacgttgtaaaataccacacataaccgtttttaacgtattcacaaatatccttatctgtgcttcaaaaaagattatctcaacaatcagtgcatattgacttttggtgtaatctctaaagtctttattctaaatattgatagtgttattcaaaatacatttaaaatctaaaaaaatactatacgtaactgtataacgtatttaaacatatctttatttgtgcttcaaggagattagctccgtgtatattctttttggtgtaatatctgaagttttcctttctgatattggtagtattatttaggatacattaaaacttaatagaataccacacgtaatcgtaacgtattcacaaatatccttatcggtgcttcaagggagattgtctctacggtcgtggcatattgtttttagtgtgatccttgtaatcttcttccgactactggtatgtattattcccttatacacttaatccgtataatctttctcccaaatactgatgtatattattcaaaatacagtaaatcttaacataatacaaagtgtaaccatgtcaaatatttgcaaacatcctttaaaatatatatacctttttataaagttacggtaaagttgtcttcgcgtaactaataaagcacgagttcgagtcgtagaagcagtaactaatacatatattaaagtaaactatctatattacaccctttgaaatacggttctctcccgaatcctacgtgaacacgatgctttgtgcaccgaattaattttttttaattattttgtttatttataaatccacccttcacatcccaaagcaccctaaaaaaaacttcattctcaagaaggaaaacaccttaaagccctcaaaataaatattattccctccggtccattataaatgatcaatttactttttattttggtataaaataagtgtccatttatataatcaagaaagaattcaatttgtttttacaaaataattcttacgtacatatttttaaaaggttttcttactcctcacattaaatatttaattaagggtagtttagccatattaggtagtaggtactccctccggttcacaataagtgtccagtttctttttttattttggttcaaaataagtgtccaggtatgttatcaagaaaaaatttaatttttttttactcttttacccttatgtgcatatccctaaaaaactcactcctcactataattatgtgaccaatactttaataagggtaggttagtcatattagatttttttgcataggatttagtaatttcttaatgagcgtgctaaaagaaaattgaacacttattatgaaccggagggagtaaggaagtatcttgtatagaatttacatcgtattttttttaacgagcgtgccaaaaataaattggtcggacgagagggagtaatataataaagtcaaaaaaagccaaaaaaatcaagaaaataaacaaagaaaaaggttgattggcttggcttttaaccaaaagagttgacacctttcacctattcccaatgtatcatcaacaccgccacaaaacaaatataatatttattttttccatttaataaaaaattgcttaacactataatattcatttttctagtaatataaaatactataatattgtactataacttccttttttttttccttctctctctttcttctctctctttctttcttttcccttctatagtctgaactgaagggtcaattatttctcatagagaagaagagttgaacagacttttggaacaaaaaaaagaaaaaaaaaacctttttaaggtatttttcttcttcttccatagaaccatttttttgtgtgagtgatcaagttgagattttgatgttattttccactttggttttttcattgttgtctgtagaaattttttttgacttatttttttgacattctcatataaaatgattattgttttttaatatttagccatgtattttagtgtaaagattggagcttttgcttcatgattgttttttttatgcgatcaagttgagatttttattggttcttgatgttatttttcacttttttttttcttttcatttttgtgtttagatttattttttttgacttcattttttgacatttttatataaactgatcttgattttagtatttggccatgtgttaaaaagtgtaaaggttagaacttttgcatcaaaattgcatttttttcctgcttttcttctctttttagaaatttgtttgactttatttttgattgatcgatcttgatttttgctgattaactttctgttttatgtgttgtgtttcagtgtaaagattgcaccttttgcttcaatattagatttttctgctttttctttgtcttttttaaataaatttgttcgttgaatttggctttttacatcaagtgataattctaacatatgaaaattaatagttttatggtctcttcagttacaaggttttcaagaaaatccactctctttttcctcttttttgttattttgatttctggttgaggggttacaataatttcatatatttcagatctagaaatatgttaaattttgctaaaaatggtatcttggaaaatgaaatggagaattttttttttgatgatcttggctttcttaagtgatgtgtacaaatttaactatctgccaaaagagccactttttttttctcctcttagcttttagttgagctccatgtgtttattgtgatcttcacatgtctatcactttatttttttgaagtgatttttgttctacaaattgtagttgattcttgatattgatgtttaacttcctttatcttgactagatttgacttattcatagtcttgtttgtttaacttcctttatcttgctgtcacgatccactgagattcagccctttgtctctccgatttgtaaaagaaaaaaatttataattggcctttgattgttgctagatgtagtgaatttagattttcttattttctttgtctatgtatttgcaggaggggaagtcatcaatttgaggattagctgtttaatcccatttggtttcttgaaaggttgttgcttttttaaccgttaatttcggggttgcgaagatgatgatgtttgaagaaatggggttctgtggcgatcttgatttcttccctgctccgctaaaggaagtggaaacagctgctccacagatcgagcaggagtcggagccggtgatggatgatgattatagtgatgaggagattgatgtggatgagctggagaggaggatgtggagggacaagatgaagctgaaaaggctgaaagaaatgactaaggggggtaaggaaggtgtcgacgctgtcaaacaacgccaatctcaggaacaagcgaggaggaagaagatgtcaagggcacaagacgggatcttgaaatacatgttgaagatgatggaagtgtgtaaagctcagggttttgtttatgggattatcccggagaaagggaaaccggttaccggggcatctgataatctcagggagtggtggaaggataaagtgaggttcgatcgaaatggacctgcagccatagcaaagtaccaatctgataatgctattccgggcaagaacgagggatctaatccgattggtcctacccctcatactttgcaggagcttcaagataccactctcggttctttattatcagctttgatgcaacattgtgatcctcctcagaggcgatttccattggaaaaaggcgttccacctccgtggtggcccactggacaggaggactggtggcctcaactaggtctttcgaaagatcaaggtcctccgccttataagaagcctcacgatctgaagaaggcttggaaagttggtgtcctcacagcggtgatcaagcacatgtcccctgatattgctaagattcgcaagctggtaaggcaatcgaagtgtttgcaggataagatgacggccaaggaaagtgcaacttggcttgccattatcaatcaggaggaagttttggctcgagaactttatcctgatcgctgtccacctttgtcctcagccggtggtagtggaacttttactatgaatgacagcagcgagtacgatgttgacggtgttgtagatgagcctaactttgatgttcaagagcaaaaaccaaaccatctcggtttgctgaatgttaatgttgatcgattcaatgagaggctacctatgcaacaacaatctcttccaatcaaggatgaaattattattgccaacttagatttcacccggaagaggaaaccggcagatgagcttactttcttgatggaccagaagatatatacttgtgagtgtcttcaatgtccgcacagcgagctccgcaatggttttcaggacagatcctcccgagacaatcatcaattaacttgtcctttcagaaattctccccaatttggagttacaaattttaatgttgacgaagtcaaaccagttgtctttcctcaacaatatgtccagccgaagccagcttctctaccgattaaccaagctccgccttcctttgatctgtcaggactcggggttcctgaagacgggcagaggatgataaacgagcttatgtcgttctacgatagtaatatacaaggaaataaaagctcaatggcggggaacgttgtgatgtcaaaagagcagcctcgtcaacaacctagtattcaacagaacaattacctacacaaccaagggattgtattggatggaaatatcttcggggacaccaacatttctgctaaccagtccgtgttcccacaaggtgatcggtttgatcagtccaaggttttaacttcaccattcaacgcaggctctaacgacaatttccatttcatgttcgggtctccattcaatttacagtccactgattacactgaagctctttccgggatcacacaggataacatgccgaagcaagatgttccgctttggtactagcaataaggatgttgctcaaatgtatatcaagtaccacgactttgtgcacatggatatcacttgtttccgttaccacgtagttgtagaggtcggaggaatctgcatggtgtaacgaaaaaggtgttaagagatgtccttggatattcgccatgctggttagaaagaactttatagatgtttttaaataaggtagtcgtcgttttgtttttacataattctgtataggttagatttatctgagatttcaatctgttttttcagtttcttaaataactgtacttcgtcgatgatttcggagagttgtgaactcttttgtgcctatgactggtcaagtataaactgttacaattctctgcagctgcagttttttcttcttgttaagtattttgagaggtgatggtgattgtgtaatgtaagccaacgctgtgtgatatgttttagaatcctatatgcaatggcttaagataaagtgttttatccaatggtgtttttcttgctttgtcctctgattcaagtctgtttctatgtaagttgttttgatttcatgaatttgaatgtttggtctacttgggtcttgtatgcattatatgaacagaaagcaaccggcggggatcattcaatacaacggtatgaacacgataccaaggcaaaacccatggaaatacccgtatatcaaagataaatagacactacgtaactttattgcattggaaaagactataatatgactcccccacccccaaatatacacacaagatcaagaattatgccgataaaagggctttggtctaagtggtaagagcgtaatacgtgttgtgtgggttaggtgtacgttactagttcgaattttaccgtcgacaagagtctggtgtttcagtggagaaagggtgaaggaacatgattattatccgtgaagtttcaaaccttgcaccgctgagtcttaggatttttcagtttttcttttaaaagaccccatataggagataaaacaagcaatccaaaactagcctcgctgttaattatcgatacttgtgttagtggatggcagcaggtacgtggttggaatagtcggttattgaaaaagacaaggagagggaataaaccaacaaacttggggtgggtgggtgggggtgggggtggggggcttcaaggaagaatcaatgttggatcaattttggttgtttaaggaaagaattagaggactttactagtaataatagcaacattaggctttgtatttaaaggcaaatttgcatgccttaattagggtaggtggctattagttgtccttacaatttaatttttcttttttcatatatatatatatatatatatatataatatttatttcgagggtacttttgacataatccgtagagtatatttactcgggttgtctctatctagataaattttttatttgtgaatatttagactattagtataaatatcagataagcgttatttctcatcaacacatgttcacggaaataatctagtattttttgtctctatcaagttttaaactctgatttctcataacttttctttattgatatctcagctacatttttagatcgattagtggttactcatttttattatttgataaccgtgatgtccgaactagtttgtgcatacctcaattaattttacgagatttcttcgaaccactacgtggcatatctgaaaaggagtcttggagcaacagtaaagttgtttccgtgtgaccatgttacgggttagagccatggaatcagccactgatatttacattaaggtagactgagactgcttacattatattggagtacaatcttttctggaccctataaaaatacaaaatactttgtgtatcgggctggccttcatgcggtgccatatttcttaaattgaacgttttctgagtcaaacgaccgaaaaagtgaaagcttgatgaaaccccgtcttttttagcatcaaccactttttcccatcccaagtaatgttatgaactttcactccctatctatactagaacctcgagcctctttcttctttataaggaagaaagtactttttaccctttttgagtaattcctaatcatttctccacaaagttttagttttggttcagagtttcaactccaataattggagttgaccatagataatatttcttaatttattaaaaaaatatacaaaagtgaaagctaaatagggaagtttttgacttgaaaaacaaacaatatgtataaatatattttctttccccaaggaagatatcacttgactaaacccaaatattaatcttctttgtcttattgttatttttgtataattatatatctcatttaacaaagtcaaattatggaaaatttgtcaagaagctctaactatgagaggaatttttttttcttttttaacaaagtcaaattattgaaaaacctacataacaagttgatttatcataataaaccgatatcatttgcacagaattatgcgtacgcttgtcgggacttttagagacaggcgccgatcgagatttttttcgattgttattgactattagcgacaaaatttggacttctaacgatcagatttttcctcgctaaagaccctttttcttatagcgaaacccgaaaaaagaaaaaggaaaaaaatgcatttatttatacaaacaaacaaagtcattgaaaggcacaaatctactagtgaagcaacattttctggcaagagaacatgtagtgcttgtaataagcttgtcttttacacctacatatgcaatgcatctatacattttttggcctatcaacagatccaatacaaaaatgctacaaaatactcttgcatttatgtatagattcaataaggagtgctcaaaagacataaggtacagtcaaacctctctgtatcaacctcgtttgttccgaatattttcggatattatagcgaaggtgttgttatagagaatatatattataacataacattgaaccatcgttccggaaaagcttgacttttatagtgaagtgttgttatatagggatgctgttatagagagatttgactgtatataatatttttgttggtttttcattcagtgtccaatattcattttggggtctacttaattcaaatttgcgttgggaggttccactttgaaggatcaaacgttccctacaaaagacgatttcacattaagggcacggattacagatatctaataaagaatgaacaagtatttaccactctatcacaataatcggtggttatacattacatactgataatagaaaaacgataattaatagtcgatctcaaaataataatcgaaaaatatgttttttttaatatgtgtgtgtaaaaaaatatacagattttatatacttttatgactacctgtaaatgatttcgaccgtagactaaaagtgtcttttatctggtataatatcatgtagaagttctaagagtactggtcatgttttgttgatatcataatagctaaccaattctttatatttgtttaatcttgttcaattagtttatttctgagctcttcgataaaacaaggaataattgaaaataaaacatttaattatttagatcttctaagtggccaattaatagcgagtggttagcgtatttcaactcttccatttaacatattaatatttaaaaagtcaataataggctttgttgtaataagttgaatgtggagtagtctccacttcattatcttaatttatttcattattttatcataaagaaccctatgatagatgaacaaattaagagtcatatatatatatatatatatatatgaaagtaccagagggggtgtattgtaactaacttaaaaacgtagtcgactcagaagggaatagtcgattttactttatgagcatgtttgattgatgatgaaaataaattgcaaggaatttaaaaactgagaacacatgagttttatattggctcagtaccggtgtggtacctacatccaattcccttgactcacaagagttctctaagatctcaatagtttgttacaatagtagtggtttttggatcgtttaccactaacgattttcagcaacgatgttttacaaacttgacacaacccttattttgtttcctaacagttcctatcttttaagacactagtaaactcaggaatacattgtttgtgctaaaaactagaaaggaatagaaaacattagtaagttgcgtaattgaattcttgaatctgctagtcttcttatacgagagtcttgagtagccgttgtaaattgacccttgattgaaggcacaaaatattctaagagattgacccaaggggtgactcagaatcctgctcaagagatgggatggatttataatcttccttccttttcgcattcataattaaggaagtgagttgtggtttaacttgttcgatcaaccttcacaatctccagattccaaatcgatcctcgaagtaaggactatcttcatatagcgactgcacttgatcttgtttacttttttatggccttgaaatcctttgatttcctttgatcgagcattgtcctcctagttttctgcaattaaaatagatacaattagatttgcactattgtcatcattgaaacttaagcgtaacaatctccccctttttgatgacgagaattaacagagtaaacagagtacacttccctttcatgtcctaaaatgcttctccccttgagttgttgctctactttactctcacgtttatccccctttgacatcaatcaaaaagaaagaagcaagtgtagatagaatatacataccatacagaacagacataccagagtaaataatgaacatagtggttagggtcacagatgttatgacttcagcagaggcacatgatgatggttcttactgaccaaagcaaaagtaataacaaatcaaaacaaacaaagagcaaaaagattgtttcaaacacacacatacacaatcgtcttagctcctccccagaacgtatttcagggtattgatcactttggtgcagaagagtcataggaggtttcaaattctctggtaattttgtccatcttctctatcatggagttgaatgccctgattacttgcctccttgtggctcccatgtccatcctgagcttagcaatgtttgtacttgtttccttggtgacttccccaatcttgtctacctgttctttcatttcagtgagcatggttttcaccccatctagtccttgctaaatctgttgtaggttggtcatagcagttgactgaggcttagttggttcagtggttggctcaaccagtagtggggtgctttcaaccttggcacgtctaaatctttcataagagagaggcttccatagcatccatacgtcatagattgtgacttaaaagacttaaacctaaatttctcacttgatctatagaagttcagtttatcctttggcccaaaaccggtgctttccactttacctttcttgcatgcaagccttttgggggttgctccatgggtctttttcctgccttcttctggcttataggaagatcctccgatgagtcactgctttcattattggtctttagaaggtctgagtcaagggatgattcaaggtcaacagtttcttcagaattttgggatttttgaacatgtctgctttgtcttgtggcggtggaggatgggaggtttctcttagacatggtagaaaagttggggagaagtgatgaagaatgagagagaatgagggtacttaactagacttttggaagattgaagggttacatcgattagaagaaaaggtaggttcagatgaagtgatacttctgaggagttgcttcggcgacaccaatggaagagtaattattgcactcacatcaaattaatgaacacatcaattaagaaaactaaaaataaagtaaaatatttacaaatatacggaagatttcttttacgcaatagacataataccaatctttttatgcagtagaaaaaatcgttcttccaaaagaggttttataaaaatatcagcaagttgagactcagtactaatgaactctaacaaaatatcaccttttgcaacatgatcatgcataaaatggtttttatatgttttccttagaatgatgcacataacctttgacagacatatagtacttgtattatcataaaaaataagagtagaagtaagagtcaaaacataatcaagaagttgatgcatgatccaaagaatttgtgtacagcagtttccaatagctaaatactctactttagtggttgacaaggcaacataattttgtttcttgctatgccagtaaattagagcattccctagtaatcggcatgtgccacttttacctttcatgtcattcctatcacctgcaaaatatatatctgaaaaatcttttaaatcaaaattgtttgaatgagcataccatagtcctaattcaatggtcctagtgaggtatctgataatgcgcttaactgcagtcaaatgagattcctttggaaccgactgaaatcttacaccgttacaaacactgaacattatatctagtcgattggcagtgagatatagtagagatccaatcattcctatatatattgttttatcaacactttttccatttttctccacttcaagagtagttgttggaatcattggagttccaataggctttgcattctccatttcaaacttttttatgagttccttggtgtactttgtttggctaataaatattcctttggaagattgcttgatttgtagtccaagaaagaagttagctctctcatcatgctcatttcgaattctcctttcataatatgagcaaattcttcacataatacatagttagaacttccaaagataatattgtctacataaattttagtaataagattacctgaatttgagcgcttaatgaactaagttttgtccatattacatcatttgaaacattggtttagaataaaagagcttagtctttcataccaggctcggggggtttgtttgagtccatataaagctttttttcaaacttgaatacatggtttgggaaactattacatacaaatctaggaggttgtttcacaaatacttcttcagagatatatccatttaggaagatgctctttacattcatttgaaatagcctgaattatttatgagcagcaaaagcaagtagaatttgaattaattctaatcttgatacaagagcaaatattttatcatagtctattccttcttactaagagtaaccttgggcaactagacttgctttgttcattcagcttatttctaaaaacccatttagttcctacgcctgaagcgctggatggttttggaaccaagtcccacacttgatttcttttcaaatcgctcaagttcatcatttatggatttgacccagtagtcatctttgagggattcatcaaccttttttggatcaagttatgatactaagaccatgtgaaagttcagcttttgagatcttgtggtagtgataccttctagtggattttcgatgatgaacttgtggggatatccgggttcactcttcaattcatttggaacacctgtggttggatcattttccaatgtagttgattgttcaatagaatatggttcctggatttacacatgctccccggttgactgattttgctgattggttgcctaatcatgactgtcttttttcgtaacatcagactttgggacaatagaaattttctcatcttcaggaaatatttcattccttaagtgagggttagtatccataaaaactacatgaatggattcctcaatactaattttcttttattgaatactctatatgttctacttgagggagaatattcaagaaaaatactttcgtcgctttttggatcaaacttaccccgattttcctttctattattgtgaatgaagcatttataactaaatggatgaaaataaatgttggttttcttactattctatagctcatatggagtccttttaagaatggtcgaatcatgcatctgttggtgatatgacatgttgtgcttacagcttctgtccaaaagtggtatgggagagagttttccacaatcatagctcttgtcatatcctgtagggttctgttcttacgttctaccactcctttttgttgagatgatcttgtagaagagaagttgtgagaaattccttgatcattatagaagtttttagaggctctgcttttgaactctcctctatggtcacttcttatagcaaaaatgcaatatctctttttacattgtaccttcttatagaatatttcaaaattccttaaagattcatctttatggctcaaaaaaataacccaggtgaaacgagaaaaatcatctacaatcacaaaggcatattttctaccaccaaaaaaaataccttcatcattttttggatcaaacttaccccaattgtcctttctattattgtgaatgaagcatttataaccaaatggatgaaaataaatattggttttcttaccaatctatagctcatatggagtctttttaagaatgggtcgaatcaggcatctgttggtgatatgacatattgtgcttatagcttctgttcagaagtggtgtgggagagagttttccacaatcatggttcttgccatgtcctgtagggttctattcttacgctctaccactccatttttttgagatgatcttggagaagagaagttgtgagaaattccttgatcattacataagttttcagaggctctgctttcgaactctcctccatggtcacatcttatagcagaaatgtaatatccctttttcacgcagtaccttcttacagaagatttcaaaattccttaaagcttcatctttatggctaaaaaaaataacccagttgaaacgagaaaaatcatctacaatcacaaaggcatattaccactaacactggtagttctagttggaccgaaaagatccatatgcaaaagttgaagaggttttgtagtagaaataatacttttgattttaaaagataaatgagtttgtttcctaattgacatgcatcacaaatttgattttgaaaatctaattttggaagaacatgacaagatcacgtttgaaaaggttttgaatagtatgcatgctagaatgaccaaaatttctatgccataaccatggattatcaatcattgtagctaagaaaatctgatttcctaatctgtcaatatttctaagagtataaacattcctatctctacttccacatagagtaattttacctgattcgtcttcaatgaaccaaccatgttttttgagacgaacctcatagtcactatcgcttagttgactgatgttgagcatgttctaaccaagtttgtctactaagtataccttatctacatcacatgatgagccgaggggaactctttctatagtagcctgcaatggaatgcagctatttctgacggatagctatgttagctaggccacctgcttgatcagggtttccatccgaactagtgccttaagcaggaaggcaaatgaaattatgtggtatggtatcgtatataagagaaagcttgcttttaggagtgatctttcgcctttattgaggagatataaaacaagcttacttactaataaagcggcaagaaacaccttctttctcaaagtcaactttctccctttttactagtagttgagtgctcattgttgttcggatcttgaccggatccgagcttcccaagatctatgttgttggggaactctgcaagggtcttaccgccttcttgattgactatatttgagtctttggagtactttaggattatattccgcgccgaggatttgtgcttgtgggccggggtgaatattgcagaccaacaaatctggtggtcgacaatcgttcagacttggtaaaggttgtcgcagcacctgtagtaggacagaggacttatcgcgatgcccgcagaccaatttatgatgtctccgtcgctgacgttcatcaagcaggccacgtggattggccagggtcttcttcggctaatgagacctcgatcccgaagccttcgcagtatctttttgataggtgcctctatttgtatggggaattcgctgctgatagatctcgcccagtgtccccctccttcccccgccaccttctgacccgcgggagtatacaatgacaatgtcggggcatgagtgcccgatcgtgagactacctgttgaacgtctgatggcaccttgctctgacctgagctatgcaacaatgagatctcccttgatcctttccgtatgtgcttgacggccccccataagacgctcacttggggacttcttactccagctattccaagagtctcctctagttgaaccgcgtccaaaagactccttgttccgctcatccccttcgtcagctctttgatcgggatactattacctaggttcctaaactttgaatagatggcggagcgtaggtggcaaacagttatatggatacagtgctttacccgtagacgcttctctagctctcgcaagaattgtatgggagtcaccctcggagggatttcccgaatgactgtaccgaggaaatctaccgtactccgtgcagctatggttgttgatcctgcagagtctacccaaaggttcaagccagattgtaggaagtgggcgatacgtttttgtatttctatgagaagctcgacggaacccacgattcccagtagtaagtcgtcggcatattgcgcgtaacaaatccttattaagtaataggtttttaagggggccagcttacgggccagacctctctctgacctgataacaagtatcacctccacgcccagctctatcagcgggccctttcttttgcaatacttaaaagagtctctcaaattacatttcctcttgatttgtctctgaatgtgacagatccgccatcaagcttagtgacacatttgaataatttcttgtcacctttcatgtgtctggaacacacgctatccagatataattttccttttcgattcttcttgcggtgttcttgcaaaatcatattacttgtttttaggtacccaagccttcttgggttctggatggttaatgttcgcattgttagcctggttagatgccttgggtcgccaaacccatcttttgttattcttgaacctacaatgataaaaggtatggccaaattttctggaataataacaagatagattgataggactttcagaagtcttatctttaaacctgcaatggttagatttatgcccatttttgccgcaatgaatgtatgcagtgtaagttcttctcctagaagaattgatacgagaaggtgactgattagatcaaatagaactttgactggttgattttctcagtccattaagttaagttgaagttcatgaacttcttcttgaagaatgtctttctatttcacgtacttcaagtttcagagcgagtcttccttttctcgttgaatcttttgaagctcatttaggaccgtctcaatgtcaataagataaatatcaataaattcttgaagttcattacatttggggcacataggagaacgtatctcactggttcctttatctgccataagaccaagttcacttaaatcttcatcaatgtcgtcattcatagccataaagcacatgttgacaatttcttcatgatcagattcttcttcatcactccaggatccaaaagactttttcttttgaaggttttcgctgagtttctttttcaattaagagcattctgcttgaatgtgtccatgttttccacattcatagcatcttctatcatttatgacattttaatttcccatcttaccttttctgaagtttggcttgcctcttctatttttgttgttccttctcatcatgcttgtaaccactttggagagcgtagcaatcttttcatcttgttctcgtcctcgtcctcctccctctcctccttctccttcttcttcttcactttttgattcaaccacaattactttaaaagtgaatgtttttcttttctctgtatgaactttcctgtttaagtgtgttttttcaaatgcaataaggtcaactctgagttcattatatgacattttgtcgagatcctaacattcaagagcaataactttgggttgccaaatagtgggttgacttcttaggatttttttgacctattctccacttctgattggtctaccaaaggatttcaagtctcctagaattttgctgaatcgagagaacattttttcaacagattctccgtctttcatttgaaatagttcatagtcacgcacaaggagatttattcttgtctcttttactttgttggttccttcgtatgtgacttctaatttgtcccacatttctttagcaaacttggtatcttttcatgctctacaccactaatgtcattttataaaagatttttatccttagcattcacttgaataacgactgcttgttcttcggtgtaatcatctaagtctagaggataaggtgatactatgacctcgccatatttatccttctttgcaggaattggaggattttctttttttatcacacatcatactttaatgtcgtatgacattgtataggttttcatacgcacttttcaatgtgaaaagtgttggccactgaagtacggtggtcttacttgaaaagtctcttcttgaaacagagctccaacaattatgtttgacgtcatgatcttttcctcacttattgttagcaatattgtgagtcctttctctgataccaatttaaagtacaagaagagggtgaattgtaactaacttaaaaaacttagtcgactcagaagggaactagtcgactttactttatcagcaggtttgattgatgatgaaaaattgcaagaaatttaaaaactgagaacacaagagttttatactggttcagtaccattgtggtacttacatctagttccctttggtcataagagttctcttagatcttcaatagtttgttacaatagtagtgatttttggatcgtttaccactaacgattttcagcaacgatgttttacaaacttgacacaactcttattttatttcctaacacttcctatcttttgagacattagtaaactcaggagtacattgtttgtgctaaaaactagaaaagaataggaaacaatggtaagttgcataattgaattcttgagtctgccaattttcttatacgagagtctagagtagtcattgcagattgaccattgattgaggcacaagatattctaagagatttgacgcaaggggtgcctcagaatcctgctcaaaagatggctggtttcattatcttcctgccttttcgcatttataatcaaaagagtgatttgtggtttaacgtgttcgatcaatcttcacaatctccaaattccaaattgttccttgaagtaaggactatcttcgtataaccactgcacttgatcttgtttcctttttgacggtcttgacatcctttgattaagcattgtccttttgttttctgcaattaaaatagatacaattatattttcactattatcatcattgaaacttaaatgtaacaatatatgagtaaaacaatattctttagtaacatctctttaccaaaaaaatatgtaaaaataatattgtatagctgctctcaagataatagtcaatataaatatatatatatatatatatatatatatatatatatatatatatatatatatatatatatatatatatatatatatatatatatatatatatatatatatatatatatatatatatatatatatatatatatatatatatatatatataacttacattatgtatattttatgcaaagactatacaaattttatacacatcttcggccatcaaatgtcaataatttctgacgggctaaaatgtaaaaagctccaaaatattgcagttgggttcacgagctttaactaaaattagaatttaaaaaataaagtcaatgcatatttaaaacaggtattgccagattaaacactaagtgattcctatttgttcaagtccaagtagacagaattatccgatattttcatcgggtgggacgaaacaggtatcccgtcaaattaggtgagatggaagcacacctaattaaacatcgtggttcttaaaaaagtttttagatttcatttttattctttcggttcctttcacgaatgatcctcgaactttatttaatataataataaaatcaataaattatttcacatcacattaaagtaactaaactacattttgggcatcgatttgtcgcttacaaaatcaaaacaccatcccacaaaaaaatattctcaagaacataacttagtgggcgtttggacataagaatagtaaaattccaaaaaaaaaaaggtgaaattttttaagtgaaaatggtatttgaatattagagttgtgtttggatatgaatatagattttggttgtttttgaagttttatgagtaatatgagtgaatattttgaaaaacaacttattatagtttttcaaattttcaaaaaatttcaaaattcatcttcaactgaaaattacaaatttttttgccgaacactgatttcgcaaaagtgaagtttttccaaaaaaggtgaaaaaattcttcatgtccaaacgggctcttagtttgataacatagtaaaatccgtacttaattcatattagttgctgataattcctacaacaactattgtagttgacaatggaaatgggtgctaaacagaaaactatttgacttgaaaaacaaaaaatatgtgtgtataaacaattatatttattacgaatcgaatctgtgtaaatcttaaatgttcttatttttcttttttcaatttttatcttcttaataatattgtaaatctcattattttcaaaagtcaaactagggaaaatttctcaataaactacctaccctcggcaaattattagagtaatattttatgtttccttatgaacaacaaaaatatgtttgtataaataattatatttagttgattgttaaagcggcaggaccatttagcttagccttgagtatcctcagaccgcctaagagacgttttaacggtcaaaaggaggaaatttactttttagtggtcagaaattgactaatttatttaaagatctttcttatagtttactagttaagattgtatttttcggttatctcgagatccttaaaactttctcttgtagttaataattgtccttcatgtgaattcatctactagaatcttcgttttcactactatttcgacttttacagtcataaataggaaagaaaaaaaaattacatgaaaaccttcctatcatattttatggataaaatgtagtgctatatatatatatatatatatatatatatatatatatatatatatatatatatatatatatatatatatatatatatatatatatatatatatataaactgtcctaaaaaatacaagacagttctgtgaaatttgaccaacaatggttttgtaacgtagccaaattttgtgatatgttttggcatcttataaacatttggttccatgatagtgttctactctatgttcttgtgtcctttatttggtagtatgatatatggaaaatattttccgaaaaagttttctaaaatcaactaattttctacaaaatttttgtaattttttttttctgtatttagttaaagagtgaaaaaatattaaataaatattaacaataatgttatcaaatcggatagtattttatcctttcttcaaagcaccccttagggtgatcagttggatcgttttagcccttcaactcagagtggatttataaggtagtatatgaggcacgtaaatttatggtatctccatcaaactagatattttatgtatgtatattttagaagtaatctaatattatctgttgacactcatactccacaaatacagaatagtgtgttggttgaataccgaattatttacccaaaggaatatggatcaattccaacttaatattttttccttcttttctttagaaattctagagctgtctctgcttcaatggataaaaatattgcaaaccctttcacccccccccccccctccccccaaaccccaaccccttttttcaccccaaaaaaaagaaagggaaaaggaaaatagagagaaatattaaccgataagggagggattatgtcaatgttccaactttcaattcacttgtgggatccgggcgatccggggggacaaccacggctcctctcttctcgagaatccatacatcccttaatagtgtatggacagctatctctcgagcacaagtttagattcggcctcaatggaaaaataaaatggagcacctaacaacgcatcttcacaaaccaagaacttaggcatttaaaatgtattcactaataattattagcttatgagcaaacaataatgtttagtcctttatatccagtttttattttatttatttatttattcttatttttttgtgatttgattcttttccacaatcaaaagagaagacgtgaacttaaggagcaaacttagcacgtttcccatttttgaataattcctaatcatttccccacaaggtcataagcaatagaaaaatcaagatttttgttgaggggttttaaaaaagaagaaagttaaaaaattaaaaagagtgactagcgggattgaccaataacctcataaaaattttgaacccctttgattactaaattattctcataggctatgacaaggggaaataaaatataatatataaaaacacaaaacatatttgctttgtatatacaatatattttccggcgataaaagttcgggcgaatcctcttccgcccctaaatccgccctcataagtgttgtcaagagttccaacaataatactaattttgtttttgctcttgatccctaatggagctcaactaacttgagaataattttaaatcatgattaaaagttgagtcgttaattttgtcacgactcaaattcccaacttatggatcgtgatggcgcctaacaccacactttctaagcaagccaatgctagaagtcgattaattaattacttaagcataaataaataaatttaaaatgaacttaattaaaataattcccaacaccaatcaagtacaataataataataacaaattaaataaaacgaaccacgaactaattaaataaataactctaagactaccccagggtctggtgtcacaatccacgaactattaaagaatactacaaataatggctgaaagaaataatgtaattgttctgaataatataaaatagtgtataaaaaaaaaataggggaagactttcgaaatctgcgaacgccggcatatgtacctcgtgccttcaaatgaatcggtggtcgtactaaagtcctctactgctgactagtacctggatctgtgcaaaagagcacatagtgtagtatcagtacaaccgaccccatgtactgagtaagtgtcgagcctaacctcggcgaagtagtgacgaggctaaggcggggcttcaacaatataatcgataacaacaataaataattgtgatgacccaaaaggtcatcctaagtaattctagctaaatctgtattccgagaccccgaaagcctccgttaatctcacctcgatatgcgtgcgcagcccgggcatgtagccgggaagcttctatgtgaaaatttgataaaaatggaactttgaattgaataattgaataaagttgactttggtcaacatttttggtaaacagacccggacctgtgatttgacggccccggagggtccgtaggaaaatatgggacttgggcgtatgcccggaatcgaattccgaagtcccaagcccgagaaatgaatttttaaagaaaattattttctgaaaataataaaggattttggaaatgaataattatctgaaaaccgtgttaccgggcccgtattacgagcccgaaacaggtttattgtatgttatgtgacttatctgtgaaatttggtgtaaaacggacttgaaataacgtgattcggattaaaatcggataagttaagctttatgaagttttaagaaatttctatgagttttgaggtttaatttgtttattttgatgatattttgatgatttaaaagcttgaataagtccgtaggatgtattgggagacgtgtgtgttttcggttttgagacccgagggctcgggtgagtttcgagtagctaacgggatgtaaaaacatgaaaaatctggtgttttgacttagtttctggtgtctggtgtttccttcactgcgatcgcatccatcgattcgcgatcgcataggcttaggtgaaggggcagctgggttgcactatgcaatcgcatctcgtcttccacgatcgcatagtgtgtcaggtggggactgggtagtatctctctgcgatcgcagacgcctggcccgctcccttccgcgatcgcacccccttgttctgcgatcgcatagtagcaaaacttcaagctttgcgatcgcagcccctcttccgcgatcgcagagaacaaaatcgcccagttatttttaagtcttaaaaacagaatactctacacgggattttataatttccagccttcttctcctcctccaacctccattgtcgacccccaagctaggatccttcaataaacctttgggtaagtgatttcaacttctatctctttcactttcctttcataatcactagaaaatgtaggcctaaattcctaaaatcaaagtaaaaattaagggttttgggtagagttagggcttatgggatattgggtgagtcaacctcaatttggggtcggatcttaaaataaatcatatatttgaactcgtggggttatgggtgatcggattttggtccgaacctcgagtttggaccaagcaggcccggggtcgaattttggttattttggaagaatgctagaaattaaatatctaggctatggggttgtattgttgagtctttattgatattattgaattaattatgcctagatatcgttgtttcagagtcggattataaaggaaagacggtcttagagggttgattgttatactttggaccgaggtaagtgtcttgcctaactttggtgagggaatatgtattatttgctatgtgctaagtgattatcatgttcatttcataggtgaagtgacgagtacctatgcaatgtgtgtcaagcatgcccgtgagtctatttttgatagaaattgcagtaatccttccatgtttagcatattatgaaattgtctttactggtaattcattcttgattgaaagtattggttgttgagttgaaaaatgttgatacgaatgataatccaagtgtagaggatacgatcgaagtgattggttatagctgagacccttgccgggcacttattgagtattaattgatgttttcccccttgccgggtgttttgaactgcttatttccactatgttgtactccttgccattttatctgttattacatggtgaggaagagtgtaaagcacgaagggtgatgtcgtgccatgatatttgattacattgcatagtgaggaagagcgtaaagcacgaagggtgatgccgtgccatgattcatattgattataagcacgaaggtaaatgccgtgccatgacttttattgattataagcacgaaggttaatgtcgtgccatgatacattgtacattgcattgtgaggaagagagtaaaagcacgaagggtaatgttgtgccatgatatttgattaccttgcatagtgaggaagagtgtaaagcacgaagggtgatgtcgtgccatgatatttgattacattgcattgtgaggaagagagtaaaagcacgaagggtgatgccgtgccattgtttacttttctgatatttacacttgcttcgttggctattgtgttagattgcctcccttgtttacttctatctgtcaatttgactgcttcatttcacttgttcccctttactgctcccgtatcccttacttgtctgcttacctcctgccttgtattattcttgttacctgctgtagaataggacatgctatcgttattgtcaagtctagcctcgtcactacttcggccgaggttaggctcggcacttactcagtacatggggtcggttgtactgatactacactgcacttctttatgttgtgcagattccgctcccagaccccgtggaccactctgagggagtcaccttcagtccacattgtgcttcaaggtataccattggcgttcgtggaccctggagtctcttctgctattgtgtcctattgtcttacttctctttcagttccaaagacaatactgtatttcgtttcagacttgtatttagtattcttatagctagtctgtgaggttgtgacaccccagttttgggattttgggatattgttgtctttatcgtttcattatgcgttttgaaatattattatttttctgctgtaagacttttgaagtaatttgggatgtttcagtaaaagttgaaagttcatggttcgggatattccagtaaaggtttgaaggttaatggccttaaatactgttacgttattaatagatgtcaaaaatgttgtgtacgttggcttgtctagagggttcaacgttagacgcagtcacggtctgaaaagtgggatttcgggtcgtgacaataataaagcaagaaagaaatctaaacaatagataaataagtgccgcacaaaaataaaataactcagctataaccaattctcaaataaattctcacattttcagactttatccttgaataaaaatagtaccaaaatatttaaacagtagtaaaatagacattctaacttttcaaaacttttattttattgttcttttaaaaatcagtaaaatataaatgtcctcccttatcgctccttgttgcggcgtgcaacccgctcccacatgtcctcccgtattgctcctccctaaaaatatcacccttattactcctgttgcggtgtgcaacccgattccacatgtccacccttatcactccttgttgcggcgtgcaacccgcttccaccagacatatcgtatcaatttatttatagttttcacaactcaggccaagcctatcacaatattatttttttgcctcaacaattataaataagaaattgtatttttttctcataaacttcatcaatatcatcgcagccatgaaaccaacaggaatatcaatatatatatatatatatataattcataaaaataatgccaaacctctcaaccgtgttataccacatataaaacagctcaaacaatcaatactctttccaatataaccacaacaatatctaacaacaaattaataaggccaaatagtcataaaaacaataataaacatataacaattaagacaataatcaattaagttgggaacgggaaagggatcatgtttaacagacaatttgggtggtgcatagatactcgtcacctcacctatacaccacgcccatgcatttcacatagcaaacacgtggggagtcatattccatcaagtcaaagttagaccaaacacttacctcaattctgcagaccactcactgctcaattattgcttttccttttgaattcacttctaacttgctcaaatctaatcaaaattaacttaatatcattaactaatgctaaaagaactaactttattgaaaaatataatttttcctaagttttctcaaaaaaagtgaaaacccgaccccgggcctgcttggtctaaactcggggttcggaccaaattatgtttacccattcacccacgaacccaaatatgctattagttttgaaatccgaccttaatttgatataaaaattcaattttttttaccaaaactccctaattctacctaaatcctaagtttttaccatgaaaattctttgtttttgctttaaaagtgatgcaaaataataaggaattgaaaaaacaaggtttaaattgattacctatgaattgaggatgaatattattgaagaatactcatttttaaggctggaacctcgaaaaattggagaagaaagggttttgcccgtttttataagatatttaaaatagctgggtgggcgactatgcgatcgcgggtaatgatatgcgatcacacagggtaaggggggttggggcagtgtgatcgcggggcggggtgagcgttcgcacagtttatcagatttccctccccaaggacaatctttgcactgtgcgttcgcacgggggagaatgtgtttgcacagtagggtccaggtgaaggagtgcgatcacgcacttgctgatgcggtcgcacagaacaaatgttggggcccttttttggttacactatgcgatcgcagtcctatctatgcgatcgcatagaacaacagacgttgacacccaaaaaataaaaaccagcagttctttcaagtgcaaaaacatcctgtggcctactcgaaactcacccgagccctcggggctctaaacaaatcatgcacgcaagtctaaaaatatcatacggacttactcgtgcgataaaatcatgaaaataacatgtaaatctatgaattaaacctcaaaacccatcgtcttcaacaagaactcttaaagttcataatttctcaatcggatgtctgaatcacgtcaaacgaacttcgtttttcaccaaatttcacagttaatttttaaatatcataacaaagttgtaccgggctctgggaccaaaatacggacccgataccaataatgtttagcataattttttttctttaattcataaatatttcagcaaaacaatttctttcaaaaattgatttctaaggcttgggacctcgaaatgcattctcgggcatacgcccgagtcccatattttactacggacctcccaggatcgtcggaatacggatccggatctgtttgctcaaaatgttgaccaaagtcaacttttattaaatttaaagtctaaaaatcactagttctcatcttttcacataaaagctttcccgtttcacgcccggactgcgcacacaaatcgaggtatttaattttagttttttatggctattaagcatggaacggaatctaattttattaaatgacccgttggatcatcacaaatttagaccttttttcttgaatatttaaacatttggagttcactcatttcatgttggagctttgtttgcaagggattaatacgaaatgatttgccaatgacaaaatatgatgaaccagaagtgtaatgaagaattaaattgaataatcttttggctaatgcagggtaaatctaaaccttttatgtattcaaggaagtgggaaaattagagatgaatagggccattaatacaaaaacaagtattatgtcccttaaaattggtattagttttaataatttttagatttctagtattagattcaactagtcccactaagaagaaaaggcttctcctatcagtggggaagcccccaaaaattgaataaaggtgtccaaatttttaaagaggaatttcagaaattactattgtttagtgtttattaatttttatagctactatgtatatataattactttttatagtaattattcagtcgttacggttgtgtattcattgtattcgcgctaatgtattcatgaacaatagcaaaagtcgccaaaaaaaacagggggttatagttgtacgtgactgtattcacttgtattcgcgctatgtattcataaatacagtaacggcaatcatgttaaaaataggtttgtccagctgtctaataatggaaatatgatcaattagtgtgatacactcctaatataactcaacaaaatcaattctaacatgccttattatcaactcaattaattagaatgatttttcagttatatatatccgttgtatttagtgtgtttcaatatatttttttattgttgcattcattagattcaatgtttgtatttactgtattcagtgtattcaaatgtattcgttttaacactattttagttattcctaatacatgttattactgcagtatttagaatatttcattggttgtattcattgtatttctatttatattcagtgtattttactgtatttcattatcttttaaaattatatatattcactgtttatattatgttatttcaatatttgtatttagtgtatttcaatatttatatcatgtattcatgcatactgtatgtatgatatgcatgaatacatgtgtattcagttgtattaaaaagatacagacattcgaaatacataaatacatgcaaaaaatgcatttatataaaatacaatgtatttgagtgaatttgtacataatacaatgaatttatgtcattgcatgtggccacataaagaaagttcgccgaagatgacgtttttcggcgaagcaaaataatgtatacattgtattaaaactaaaaaagaagacgaacacaacccgaccctcaaatcttctctgacgtagaaaatactgcagtatcctttgttcatgttacattacccatgctctactcgtattattcctacatcgtttttgctccttgtgcagtggccctagcctcagagcgacgagcccttccttgcaatgaaggaaactgattttgaagaaaaggtccgtctttcccctctttctcccaacagtttagaagtattttcaattgcagtaaccctagaggattcggccagagaattcacgattcgaggcatgtattttgtttgaagagagagagagaaagaagaaaattttgagagataatcgtgtgttaattgaaagaaagaaagaggaaaaacatctatagcgtatttcacgcctcaatggtagtatatactataaatacctattttgctattaaatatatatggtagctatgacaaataatattttaaaatgattttgatttattataaataggatatgtacctttgctatattaaaaaaaaaatcaaatttacataccctttgccaatgggctatgcaagagcgttcaaagtctattttctgatcaataacaagtactccatatgttccagtttatgtgaacctatttccttttaagttcgttccaaaaagaatgacgcctttctaaatttggaaacaatttaacttaaactttcaattatacccttaatgagaagcttttaaccacgcaaatattctgaacccctttttgacttgtttaagaccacaaattctaatagccttcattttttttaaacaccgtacccaatcaaacaaattcaaataaattgaaacagagagagagtaatactttatcctatactctgtataatttattgacgaaggatattcagtagaccatcctgacacacatagctttgcccctacttcttatcactagatttttcgttcgcaattctggaaccatagacctctacaaggtggagtgcaatagcaaagctagaattgttttactaaagggattcaaaatataaagattaatgaaagaaataaaaaggattcaacatataatatatatatatatatatatatatatatatatatatatatatatatatatatatatatataataataaaagtgactccgttattgctagagtgattccaactattccgccagtaactaattagtagaaaaataaagtacaattaaacctaaatgggttgtttggtatggaggataaggtaggataaattgggatgaagtgtgatattaaatttgtattatgtttggctgacggtataaatttatatcgtcaaccaaacatataattagtcccagacttaatcctgaatatcccatcttattccatattatccaatcaaacttatattatttatcgtacctttcaggtggaataaattaatttaaagattataatctcaggactataacccgaaaataatttagtccgcgtaccaaacgacccgaaattatccaaccctcttcccaaaccccataaaccaataaaaatagaaggacaaaataactcattaatatggtaaatggtctttggaaggcacaaatctaccatgtgaagcaacattttctggcaagagaacatgtagggtttgtaaaagagttgtctttgtatgcatgcatctgtatattgttcttggcatattaatagatccaaaaccaaaaaaagacaaaaatttaaaaaaaataaaaaatacaagatgcccttccatttttattatatataaattcaaaaaagtagtaatcaggacaaatgcatgtatataaaattcaataggaactgtcctaaaaatactagacagtctctgctgttataggctaactggttaactatttctttacttgttttttttttttcaattaatttaatttcgagcttcgataataaaaataaaatattaggtaatttcttttcgtctacctaacagtaacagcttgtttgaatagtagttacctattaactatcgtattgtatcgtattgttactttaaatacaatatttgttttgattgttacttaaatttcattatatcgtatcgttaaatctatcgttacgtaaagacgaaaattgtaattgtacaaaacgacggattttgtgtggtggtgtcatttccctgctttttttaccaagatattggagtataccacatatgatcgagaaaatagtacctataatcacatgaaaaccatgaaagacagttgctaagaaaaaggtagaaccataaatactcgaaatagtgaagggtgcttgacaatattccattccttgaaagcctgtgaatactagagccagtgagacggcctcgagagtatagcatgatgagcgcaagttacggcagctccggatgaaaggggaataagggtattaataagaaaaggatttttctgatattgcccttccttattattaaataatcatttatcctttattctactttcttatataataattctatttcgtatcctattttttcttagtaatgaagtaagtttattcttcatattattggtggataattcatgaaacgaccacaaacaatacaatctatccaattattgtattcgtcaaacaatacaatacgatacattatgaaacaacatataacaacaatccaaacaagctgtaagtataggtgagcaaaattatccgatacccatgctgaagcgaattagcaagtacccagtagaatagtcgaggtacgcaaaacctgacccggacagcaccttcataaataaataaaaaaagtgacttattgttcaaattgctgatctgggagagaatttccttcttgattttctaactgggaatagcttgtagctaacaaattccagctcttccatttttattatttaataaccccccaaaaaaatagtattgtttttattgaatagtaggttgaatgtagagtatgttcacagttatctaatttattatgtatttttttctcgacagctattttagctcaaccaacattgttttcaatttacataaacttatgaagtcaatgcatataaaaatagacactaaaatatgcttcatattttggtatctttaggaaaaaaataaccaaaataacattatcaagcagtagaaaattaaacttcattcatggcaaattttaaaaatgctagtataatttttcattggtgttctgtttttatgtgcctgtgtaaataatatgtgatggaactaaaatggtagtaccattgcttaggagatggcttttgacaaaatgttttattcttgtacatgggaagtaatagggggaagctcggaaaagcatcatgcattcacgcagagttcggggaaagaccgcaacaagaggtatgatgtaggcagcctaccctgatgcaagcattagtgagtgatttcacagctcgaacctatgaactataggttatcgaaggccatcttaccgttgcatgagaagtaatatagttgttgctaatttcttccggataagttttttggtgtttggtcaattttttttttcataaacacaagagacggggtgtacatgaaccgggttggttcggattttatcaaacccaaaccaaaccaactatatagatttgggttggttcggttttgtcgtgtttttcgaattttcaggtttttttattccatgaatattattcgaaccttactttgttaaagttatagataaagttttaataagtgaatatatgtttagtaaatattgaaaaaattgaccaacaaatgatctattaaaatattccaatgggagaattttttttagtaacacatgatagttattttcttagtcgtctagcaaatatatactttcatggttaacacatgagagtatcccaaatatttctatatttttaaaaaaaattcgatataaagtcttaaaaatatatataaaattatatatttatatatcgatttggtccgaatgtttttactcaataccaaacctagtcgggttttttaatcggattggattggtttttcggtttggtatggtatttcgattcggtttgaacacccctacacgagtaactaaagttgctgtttggtgattataatttgtaacttcatattagagaaggtgcaaagaagaatttgctgacatttataattctaaataaatgaaagctgcaaataactaagaatttgttatatttcttttagcaaaaaaaatcaatgaggattttgtttggagtcctcttgacaaaagtcacagaaatcattaggaagtcttttctgtaaacaataatctattcttttttctaacatttctaatcctctctcaaaagacaatactccaacatgcattgtcctagcatcaacttgtgcaactttggcacaagatcgaagtaatatgtaataatcagcatgtgtagcataaatgtaggcatcatctttccttctagcgtacctgatgtagccattcttcttcttcacatgttttctaggtgggatataacagaatctgttttcttgcatgttttctttcagtcgcctcaatgctgtctccttacgcgactctgcagaaggtcgatctccatgtccttttaagccacattctgagcaactagctgcattaaaaccgtcatcatccagtgatatgtcgcatttgcatctattgacgctaaatttcttgcttgaacttggggtacttttgcatacaccccttgatcccttgtgttgaaagccattacatgtgtgtgattctactttctcatcatctgatgcttcttcagcctgaaatcaaacaatttaaaaagtaaacaaacaaagacgagtacgatcctgcatttctgcaagaggctgtttccacggctcgaacccgtgacctccttgtcacatgacaccaactttaccaattacgccaaggctccccttcataaagaggaatacaatgaacgcagtaccttatggctttgatagaagtcccacaaatcttcaattatcctttcttcttcatgatcttcataagaaggttcaagtccagcaaaaaccacatctttgcaatactgaagatatgattgtaaatctttcgaaaaatctgctaaagcaagaaaagatataattcaaagaagttaacctgctattcaactttaaccctacactattaccatattttctggggaaaaaaaattagtgactaatggaattaccatatgtatcactgagctcatcatattttgcttcaagaatcttcaagagctccaaagcattaaaatcagattcattcacatctggtgtactatcgttaggatctgaatcttgtgaagccaagtcttcctcagcagaattgacttttccattgcaactgaaactcggttctccaattccatcctcatcatccggtgctaaaccactagaagaagataaaatcatctcccattttccaccattaaggtcataaagaatccttattgtaacaatcagaatagacatcacacaaacacgagaaggcagcctcaactcgttatctgacaaatacaactctggaggcatagaccactcatacacttggcatgcccgaggaagaattttttcaacaggaagcgataactgcttgagataacgggaagctatagcatggaagtttactggaggtaattccaagcctattctccgagccatggcagttgcaaagaactctaatttttgcaaggtgatagattggataggcctgaacatacggctggtacttatagggcatgccctcgaaggaggtcccagctgcttctcaatttcaagaaaagcggcaaaatatgggatcttcccttctactgcccacttcaatatgtctgttggcaggattgcctcccttgccaagtgacaagcaagaaaagagatagctagcgaacaagataatggaataatgctgtgtagggatttatgccatatggtaactgcccgtttaccaagtaaattgtgtggttctgttttctggctgccgctaagcatagcactatctatctcccctgcaacaagcaccagaatcagggaaaggagggtgagtaacatagagcaaggaatcactgcaatgcataaatgatgttgtaaagatcaactcagctcaattaaagtaatttgattgtgtaaacgtatccactttgctaaaataatatgggtttaatgttgttacaacttcttccacttatcgtttaaagaggatggagaggacatgtttttgcttcacatgaaaaaatatagaaggcaaaagaaccaaaatttagggatggcaatggggcggggcgggttcaacttaaacccgcaatgactcaacccgccccgcataactttttttaaattatttttttctatttatccattttcatttattgattagtaacatattttaatgagccagttatctatttttcacttaacatgttgcaccaaaagttatgctatttataaaacagtttaggactaaattttttatgatatctataaaatttcacttattgattaatctataaggtagaacttttaaaatttgacaactaaacttcatgttctacacaatattagcacatccgaatggaaatatacaacatcctgaacagataaacgggcagttgtagttataaataaggtattataatattgaaactagattatgattccaataaattattacctttagttttgttaaactatgaactaatagtaacaaatgattaacataatttataagctgctgaattttcaagaatattactagaaatctagaatcataacacataatcaggtaaatgtgttctggcaaaaaaacaaaaacaaaaaaaaaacagaaaaagcaacgatatgattttcctacagaatatggttcaatatgtatatgaagattgtgattaatcaacgaaattaacttccagtgttagcctaaaggcctaaacacccaaaactggataaaggcaatggagggtaaaagaactcgcaacccgccccgcctcgcattgagtttaattttttatattaaaacccgccccgcacccgcataagcttcaacccgcaccgcacccgcataggtttaaacccgccccgcacccgcacccgcacccgcaccgcaccattcctaaccaaaaaccaagaggaacattgcactctcattgtacaacttttgccatccagcacaaagtagtagaatatgccaaataactagtcctacacttcaaaagcttcaggagaatagtcacagcattataaatttaatgcaaatgaaaaaagcatcatcttactttggtcaaatgcacgatgctaggacatggctaaaatctaattctccaatatgaacatctaatgaatagaaaaatatcatagagaaacaacaaataaaatgagaagtggcctatgcttcatatcaacgataagttaatcaaataccttgagtttgagactctgattcatgaatgacattgtctgcccactcatccgccataaccttttcatgtgctaaatatctcagccatacaggcccaacaaccccaacaattagagggcttacattaaatttctccactagcgccttacactgcaattggatcataacttgtaaccccataacataccttaatcggactcctgaataataatcagtatatgttaaggaactttgaaacggcccaaaatcagcaggctcaactccatcaccttcattatcctcttggttgtcatctaaagtgttcaaagtttctagatgctgggactgtgaaagcttaacctgagatatcggctcagcttgacaaatctggctgggagcacggcgctgactggcagcatatattcccccgtccagattgaataggtcatcatcatcaacaccagtgtcgatgatgtcattcgcttgagagccgcaaagagtgcaatagaagaatccatcaccaccatcattaaaggatatattgccacaaatctcgcatcgtttttgaatccgctctgtcattctatctttttgtatggttcagtgatcaaactctctgacatgaagtgttggttaattagtcctactagcagcaggttaactcaaggagactaaaacgattaatcctagaaattgtttttcgcttagattaacatttcttaaaagcactctataccaacaaaatgatagggttatttgttaaaattcctgtacttaaaacacaaaacacgattcaaccaaagcaatctcaactttatggaattaatactcctcaaataaataaaagatctttttcacctcattcttcatgattatatagttggtcaataattacattcttacctcagtcctaaaagctaattgcaagggacaaaggcatgtcattataatcatgtgattataactttaagtattagatcatacaaaatttactttactccattgaagcattatataaaacaccttcagggcaataaagtgatgcaacaaattacaacaatacaacaataacaacccagtataatcccactagtggggtttggagagggtagtgtgtacgcagaccttacccctaccctaggatagagaggttgtttccaatagaccctcggcatccttccctccaagaactccccaccttgatcttggggtgactcgaactcacaacctcttggttggaagtggagggtgtttaccatcagaggaacccaccttgtctatatgtgacgatatagcaatcaaaaatggattcatttcttaccgtcaccacctaacataaaatttgattgctcaacagccaaccaaagtgttctatacttcttcacaatcgtcttcgtatagaaagaaagtagaaacacaaaatggaatagtcacatactattaagtaaattgtgagttttcaccaaagcaacaaaataaagatgcactgtcaaactgcaagacggtaacaccaataagtagactgatatactactttcatttaagtaggaagggcaatggaaaacaaccaggttcttgcactgtgaaatttacaatattcagaaattaaagcaaggaagcaaattgtattaatattattttcgcaagttagtgtacaaattgtaactggaacagataatttttccatttaggatttaacttatatgcattcactaaagttaaattatcagtcaaatttatttaaaaaaaagagcttaaccttgatatcaaactgaaatctccttccactttctcactaggtttcatcggctttgtttaagccgctcgcggtttgacccgtttctgccgttttcctctgattttcggtcttaagctactgtggtcggagtttatagaattctatacattcagagattgttgatcgttgccggactcttcttacggtgattctccggcggctgtgaatcccggcgatgattcgctcacctctgggattactccaattgaagtttctctttttactaaaacctaaattgaacataataatccaattagacttaccttatttttcccttttgtttttctatagtactcttctatttcattacatcattttcttaggcctcgttttttttttttaaagattaagacgtctgaatctgaatgcacgtctgaatattaagatgtggtaatgattaagacggtttgtttttcaacatctgaatacgtataatatatatcaagataaaacatacaattcaaaaaaaaaagtgattaaatattatatcaatttagtggcctaaagccgaattttaataagaatctaaattttataaacctatacaagtatatgcaaaaactttgatgttgtcttttttccttccgtacttatatatataatagtactcatacaagatatatgacttttagcttcatttggtaatattattattatttatattatcaagtgttaattaaaattagtaagatgtcagccatacgtttgcaatgcattaccttgaatgtaaaaaactttatttgctaatacaaagatttgagtagtttaattcgaagttctagaatatttcttatgttaaaaagtaaatattctttgttttttaaaacttttttacacggattttatacttttttatacaaagttcaaaattgtgtaagtcaaaatattattacgtattttacaacactttttggggcctcaaaatttttggggcctaaagagaaggctttactagcctcacccttgagccaccttgagccacccatgaagataagttgtatatttctaagcaaataatctgtttgaaatgtagtaaatggtatgatcttaaacacaaaataggaaaaaaaattgaggaagtaaagaagctattcttgaataaacaaaagaaagcatggttcaatgaataattcaagagcaatagcacataaatattcagaaaacactaaaatataaatcttacttatgtatacattatccaaattctagccaaatatgaaactatagcggctctaatttcaacaacacagaacttcattatcggaattctagccatagcaaagtttcttaattttggacgagcttcataaacaccaattacggtttatatttcaactagagaaattgaattacgatttagagaatcgggatgtcaacaaaatcaagaaaaattacagaaaattcagagattcaatcaaaataaaatatccaaaagtgagaacaagacacaaataagaggcaagcaaaaccttctagtttagccccttctcaatcgtattttaaaaaaccctaaactcgaaactgaaatttaccattagaaaagtggaaacaagatggagaattccaagtataattttcaaaatcttacccagaaaaagattcggcggctgcttgatccttgaagagagagagacgtgtgtgaaatttgttttgggtttagaagaaatagcctgatgtcaatagagagaaataaaaaaataaaaaataaaaaaacacttaatgggcgaagatctgtttcattcagattgagacccaattttgtaaagaataaaataaattttcaaaagggcccaaccgggttcgaaccggtgacctcttgatctgcagtcaaatgctctaccactgagctatggacccttattgctgattacctaaactactatttactagtcctactagatgatatttactgatattaactttctttagttcccctacaggtttaatatagaatgcaaacatgctactatagtctagagatcacaaaataactgtaacagccgaggcggatccaaaatttaaactctacatttaagattattaggattatacagtcacacatctctataacagcatccctatataacaacactttactataaaagctaagcttttcggaatcgattttcatgttatgttataatatatggcccctataacagcacttcgttgtagcagccaaaaatattctaaacaaaattatatagagaggtttgactatattttttaaattatgggttcgtttttactatttgttacaattttactaaatttctatgcttatgctcccaaacgctaaattgcttctggtcagcagtactaacttagccattataataacatgcttttgaaatatttcaatctaactctgcaaataggtataaaaatatgttaaccaataacttctcttatagcatgtttggccaagcttttcttgggccaaaagtgcttttggccaaaaattgaagtgtttggccaagcttttggaaggaaaaaaagtacttttgaggagaagcagaagcagttttggagaagcagaaaaaagtagtttctcccaaaagcacttttctgagaagcactttggagaaaaatacacttagaagccgttttcaaaagcttggtcaaacactaattactgcttaaaagtgtttttcaaattaattagccaaacacaaactacttctcaccaaaagcactttttttaaaagtacttttgagaaaagcacttctcaaaataagctgattttagaagcttggccaaacgggctattagtatggagctacctctgcctaacagtggcgaaagttaggaattttctcatgtgtgttcaaatttaaaagcaatgaaaaaaaattccgataaagggtgttcagtatatattatatacctctaaaaagtaatatttcacttatgtacacagtgcaattttttgatgaatggtgattttgaccacccttatgaccatttggcttcgccactactgactaaccttgaccgtcattaaaaagtgatgtatatatatacttttggggtaatattgtttgaattcttaacgtatagaatttttgcagaagttgttcatggaaattctggaatgctgatataacaagatgagtgatattattggccttccaaattaagtcgtccggctgatcgttttgatccattgctaaagaagaatcgattatacttgtgtgagataataggtactcaatagaataatcgaggtgtgagcaaagcgcctcaaacaccactaattatttaaagaaaaagcatatatagcagagaaggcaagcttaaagttcttgatggtatgctccatgtctcttaggtgtattctcgagacgccgctttgtcatatttttactaagtgaattatgatctacaaaatgtaccctataatgtgttagatgatgtgatctcttgtcaacacaaagacctcaaaattggacttaaaatgcgctatatatatataaaccttgaatttattctcttgtagagtgatgaaataggactctagcattttccctttgttaaattttgaaataaaataaccaagtttagaaattttaggccattacaaatgaaaacatccataaatttaatcaataaaattatacaagaacttacagaaggagtagtataaatatagtgaagttcatgaatgtgattccttctaggaaattacttgctgagttctaaattagttagtttgtcattcaacgtattgtataaatatcttttttctttcttttttgaaattttccacattcaaaaaataaaaatatttattactaagtgaattatgatctataaattctgtctgacaatgcgttgggtggttgatctcgacttcagaattggacttaacatgtgacatacataaaccttgagtttattctcttatttttcttattctcaaactattataggatacgactaacaaagccagattagtaaccaaagctatcaacatatagaccaccagaagcagtaccatgtacaacataatggagcatagtatggagcctacgctcgctgatcatctagtccacaagatccaccatgaacctcgtttccttctagcagcactagcagcagcatcgagtaccatgaaccccagaagggatgccctcatcttgtctctacaccccatctttttaagagacgcaattgttttgccacctgctataattgtttcaactccaattccagtaagtgcttccagttttcttgaaatatactctgttccttctctaacaggttctctatcagccaaaacttagttggaagttttgaaccaccaacaatggcagcaaatggcttctttgatttttctagatgttgagaaagatagcaatagcaaagttcctttctcaaaaggagtccagcaactgatggtttcaagtaccaaggaacccctaccatggaagtgtatgatttgtgtgaagtcctctataacgacccggtcggtcgttccgtagaatttacatttttactattatatatgccttgttctagcttggttatactgtgcatgatgtgttagagttggttagctcaggttcggagtggttgttgtaggaattgagacacttagtctctaaaaatagcattatagttggaaaagtcaactaagagttgacttattggtaatcaacctaggaatgtgtattgtatggcttgtatagcttcgttagatgatttgggacttaggagtatgttcggaataattttgtgatgtccggtgtagaattaggcttgaattggcaaaaattattttttgacgatttccggtcggcagtggaaaataggctatcggggtcggaatataattccgatagttgaaacaagttcataatgtcattttagatatgtctgcaaaatttcaggtcaatcagagttgttttggatagtttcggcatcgttggtggaatttagaaatttcaatgttcttaggattgaattcgatgtgattgtggtgttttgatgttattttgggtgtttcgaaggttcgactaagtttgaaagatgttatgggatatgatggtaggtttggttgaggtcccgggggcctcggggttgattttggatggttaacgggcaatttcgggctttggagaagtgctggtttctggtgtttctgcagatggattttaccctatgcgttcgcggaaggggtctcgcgttcgcataggggaaggtggaggtgcgttcgcgtagagtattagcggttgagggaccccccaagccattggtctacacgttcgcggggcctggagtgcgatcgcgaaggagtggctggtggaagttgtgcgttcgcggaaggctgaccgcgttcgcggagggatgactaggttaggcatcgcgaacgcgacccagttggtgcgttcgcgtagggtaaattgaggcctagagattttgtgcttcgcgaacgcgggagggggggccgcattcgcattgaaggaataactgggaagtttatattaaaaccctccgcgacctttaaccatttttccaccatttttgaacggaagagagcttttgaggtgattttgaagagagaaaatcattgttcttcattaaggtaaggattttggaccctaaaactcgattatatgtgattaaggaccaaattaacagtgtttaatttatgaaaatcactagaaaaatgtgaagttagggcttgagattatgagacattttagggatgatttgaggggtcaaacgaactccgatttttgagttctttatatgtacggactcgtgagatgatgaagaacattttgatataaagtttgttgagtttcaagacgcgagcccgagggtcaggttttgactaatttcggattttgtgcataaagttgagatttttcgattggatgtcaatcctttagcattttgatgttatgaatctgaaattgatagatttgaagcactcggaagtttattcgatgggaaaacgcgttgcggagtagcttttcaagctagtttgaggtaagtaatgtctttaaatcctgtccagcgtccgcaacttcttcatttcccctccctctattagtattagtactttgttttcgagatattgttcttatgtaagtagcagtgttagttattcttagatgctcatgatcattgactccagtctgggggaaattattagactgtcgaatcttattatgttgcttgcaaacttagcgtaaattcttatacttaatacgccggttattaataatttgagaagttatattgaaatgaatgagtagttatgtgatggttggctagcctagttccacgataggcgccatcacgacctgttaggctttggggtcgtgataagttggtatcagagcactaggttacctaggactcaacggtcatgagcaggtttagtagagtcttgcggatcggtactgagacgtctgtacttatcttcgagaggctacagaactcttaggaaaaatctcattatcttgaactctgtcgtgtcattctattgattttggaaatctaaacttctgttgtttcattctctcacagatggtgaggacacgcgctacggatcagggtgaccggacaccagctggacccatgaggggtcgaggccgcggtcgaggtcgtggtagaggtaggggatcaacccaggcagcagctgggacagtaccagaggatccccctactatccaggatcaggttcccatcgtaggtgctccaacggggaaggcccaggcactggcagtgccatagttattccgggtcttcaggagacccttgctcagatattgacagtgtgtactactttggctcatgcggttgctatgtctactaccacagccacatctcaggtcgggggaggcactcagactccagctccccggacacctgagcaagttgtacagggcctacagacaccaggggcagttccagtccagccggttgccccaattcaggactatgtggtcccagctatgcccgaggacgagaaccgcaagctggagaggttcagcaaacttcagcctccgacattcagcggtacagagggcgaggatgcccaaggttttctggataaatgtcagaggatactccgtactgctggtattttggataccagtggggtctcatttgctacatttcagtttgctggtgctgccttcacttggtgggaggcattggagaggcgtaggccggttggatcagcacccctcacatagcagcagttctccatgatctttctggagaagtatgttcctcagtctcacagagaggagcagcgcagacagttcgagcagctgcgccagggagagttgtcagtcacacagtacgagttgaggttttctgagttggctcggcatgcttctgagttagtccctactgatagggagcgtatcaggaggtttgtaaatggtctcacttaccagctccgcatttgatgaccagagagagggtgtatggagccacatttgagcaggttgttgacatagcccgggacattgagtcggttcgtaggtaggagcgtgaggagagggaggccaagaggcctcggggatcaggtagcttcaatggttccccttccatagggaaatttcagcataggagaggtcgttcattcagacctccacagccagtccgcccagcctatagtggcgcatcttcggggcagggtccccgcagctctcagcagggtcattcatcttttagcgcccttccagctcagagctcctccagagcatcatcatatcagggttcttctatgcatggttctggttcgtccggcagctatcagggtagtaggggttcccttcggtccccatctccagccccgggtagttgttttgagtgtggagagtttggtcatggataaaggttttgccctcatcgttctggtagttcatctcagcagaggggtcagccctcggcttcagccccagtccctacactacccacccaggcagccaggggtggaggtcggcagtcagaggccgccctagagggggaggtcgagcaggtggaggacagcgatgtatttatacactcccagctaggcctgatgctatggcctcagatgcggtgattacatgtactatctcagtctgtcacagtgatgctttggctttatttgaccctggttccacgtactcgtatgtttcatcctattttgctcacttcctgagtatgccctgtgagtctttcgctacgtctattcatgtgtcgactccggtgggcgatactattattgtggaccgtgtgtatcggtcttatgtgatatctattgggggtctggagacccgaatggacttgttgttactcagcatggttgagtttgatgtgattctaggcatggattggttatccccatgtcatgatattcttgattttcacgctaagaccgtgaccctagctatgcccggagtcccgagagttgagtggagagggtttgttgagtatgtgcctagcagggtgatttcttatttgagggctcagcgtatggttgggaaggggtgtgaatcttatcttgattttgtgagggatgttagtagtgagactccttctattgattctgttcccgtggtccgtgagttttcggacgtatttcctgtagacctgccaggcatgccacctgacagggacattgattttggtattgacctggtgccagacgcccagcctatctctacttcaccttatcgtatggcaccaacagagttgaaagaattgaaagagcagcttcaggaactcttagagaaggggttcattcggcctagtgtgtcaccttggggtgcaccggtattgtttgtgaagaagaaggatgtctctatgcgcatgtgtattgattataggcagctgaacaaggttacggtgaagaaccggtatcctttgctccgtattgatgacttgtttgaccagcttcagcgagctagagtgttctctaagattgacttgaggtccgggtatcaccagttgaagatttgggattctgacattccgaagactgctttcaggaccagatatggtcattatgagtttctggttatgtcatttgggctgaccaattccccagtcgcgttcatgcaattgatgaacaacgtgtttcagccttaccttgattccttcgtcattgtgttcattgatgacatcctggtgtattctcgtagccaggaagagcatgctcaacatttgagagttgtgttacagaggttgtgggaggagaagctttatgcaaaattctccaagtgtgagttttggcttggttcagtagctttcttggggcacgtggtgtctagtgagggtattcaggttgatccgaagaagattgaggcggtgcagagttggcccagaccgtcctcagctacagagattaggagtttccttggtttggcaggatattaccgtcgctttgtggaaggattctcttctattgcttcgcctttgaccagactgacccagaagggtgctccattcatatggtctgatgagtgtgaggagagctttcagaaactcaagtcagcattgaccacagctccgatattggttttgcctacgggttcgggttcttatacaatctactgtgatgcttctagagttggcttgggagtggtattgatgtaggacggtagggtgattgcctacacgtctagacagttgaaggtgcacgagaagaattacccagtgcacgatcttgagttagctgccattgttcatgccttgaagatttggcgccattatttatatggggtacagtgtgagattttcactgatcatcgtagtttgcagtatctgctgaagcagaaggacttgaatttgcgtcagagaaggtggttagagcttctcaaggattatgacctcactattttgtatcatccggggaaggccaatgtagtggccgatgctttgagtcgcagagccgagagtttggggagtctagcttacctttcagcagcagagcgacctttagcacttgattttatgctttagcgggtcagttggtgagattggatttgtcagagcctccacgggtattagctagcatggcttctcggtcttctctttatgctcagattagagcacaccagtatgatgaccggaacttgttagttcttcaggacagggtccgtcgaggtgatgtcagggatgtgactattggtgatgacggggttatgaggatgcagtgccgtatttgcgtgcctaatatggatgggcttcgagagttgatattagtagaggcccacagctcgcggtattccattcatccaggtgacgcgaagatgtatcaggatctgagacaatagtcttggtagaggcggatgaagagagatattgtcgagtatgtagcacggtgtctcaactgccagcaggtcaagtatgagcaccagagaccaggtggattacttcagaggttagatattccagagtggaagtgggagcggatcaatatggactagttgggcttccatgaatttcgaagggttttgatgttatttgggtcattgtggatcgactgaccaagtccacgcacttcattcctgttggtactacttatacttcagagcggttagctagtatttacatcagggagattgtccgattgcatggggttgcattttctatcattttcgacagaggtactcagttcacatctcagttttggagggccgtacagagaggtatgggtactcaggtagagttgagtactgcatttcatcctcatattgacgggcagtcagagcggactatttagattttggaggacatgttgcgtgcatgtgtgattgatattggtggttcatgagatcagtttctgccactagcggagtttgcatataataacagctgccagtccagtattcagatggccctgtatgaggctttatatggtaggaggtgtagatctccggttggttggtttgaccccggtgaggctaagctattaggcccagatttggttcaggatgcgttggagagggtgaagttgattcaggagcgacttcgtacggcgcagtctaagcagaagagttatgcggaccggaaggttcgggatgtgtctttcatgtagggtgacaaggtacttctgaaggtgtcacccatgaagggtgttatgaggttcgggaagaggggcaagttgagtcaccggtttattggtccatttgaggtgcttcagaaggttggagaggtggcttatagacttgcctttccacccagcttgtcgagtgttcatccggtattccatgtgtcgatgctccggaagtacgttgatgacccgtctcatgttttagacttcagtacagttcagctcgaggatgatatgtcatatgaggttgagccagtggcaattttagctcgccaagtcagaaagttgaggtccaaggatatagcttcagtgaaggttcagtggagaggtcagctagtggaggaggctatttgggagaccgagcgagagatgcggagcagatatcctcacttgtttgagactccaggtatgtttctagacccgttcgaggacgaacgtttgtttaagagggggagaatgtaacgacacggtcggtcgttccgtagaatttgcatttttattactgtatctgccttttcatagcttgattatattgttcattatgtgttagagttggttagctccggtcggagtggttgtagtaggaattgagacacttagtctctaaaaatggccttatagttgaaaaagtcagctgagagttgacttattgataaacgacctcggaatgcggattttatggctcggatagcttcgttaggtgatttgggacttaggagtgtgtttgaaatatttttgtgatgtccggtgtagaattaggcttggattggcgaaagttagtttttggcgatttccggtcggcagtggaaaatatcggggtcggaatggaattcctacagttggaacaggttcgtaatttcattttggatatgtctgcaagatttcaggtcaatcagagttgttttggatagttttggcatcgttggtggaattaagaaatttcaatgttcttaggattgaattcgatgtgattgtggtgttttgatgttattttgggtgtttcgaaggttcaactaagtttaaaagatgtaatgggatatgatggtaggtttgtttgaggtcccgggggcctcggggttgactttggatggttaacgggcaattttgggctttggagaagtgctggtttctggtgtttatgcagagggattttaccctatgcgttcgcgaagggggtctcgcgttcgtataggggaggttgagagctgaggaaatttcttctgtgtgttcttgaaggttgaggtgcgaacgcaggggtggaggtgtgttcgcgtagagtattagcggttgagggaccccccaggccattggtctacgcgttcgcggggcctgaggtgcgatcgcgaaggagtggctggtggagttgtgcgtttgcggaaggctgaccgcgttagcggtgggatgaccaggttaggcatcgtgaacgcgaactagttggtgcgttcgcgtagggtaaattgaggtctggagattttgtgcttcacgaacgagggaggggggccgcgttcgcattgaaggaataactgggcagtttatattaaaaccctctgcgaccattaaccatttttccaccatttttgaacgggaagagagcttttgaggcgattttgaagagagaaaatcattgttcttcattaaggtaaggattttggaccctaaaactcgattatatgtgattaaggaccaaattaatagtgtttaatttatgaaaatcagtagaaaaaggtgaagttaggtcttgagattatgagacattttagggatgatttgaggggtcaaacgaactccgatttttgagttctttatatgtacggactcgtgagatgatgaagaacattttggtataaagtttgtcgagttctaagacgcgggtccgggggtcgggttttgactaatttcgggttttttgcatacagaagttgattcgaggggcaaacgcattgcaaagtagcttttcgggctagtttgaggtaagtaatgtctttaaatcctgtcctgagggtatgaaaccccggacaatgcttcctttcacggttttggagtgcacaaattgggaattcggaaatatattcctttttaggcaactattgagttgcgaaaccgcttttaaggcttattctttatagtattgatatgttttgatataattgggttgtaagccatgtttggggcctagtgccgatctatttaaccccttggggctatttttactgatattcctcacttaatatgttatgacttcacacttagtcttcttgataattgtttgacactcaaagtatgctaatattatttcttgaaaatgaaatactgattttgggtcgagaaccctgtatatttatggcccgagtggcatattgagagtgtctgactaagtgaggccgagagactatattgtgaggatgttatgatatgagagaggccgagtgcctgagagtgattgatgccatgacttggcttatttatagcgcatgggatgaaggagcccctccggagtctgtacacccccagtgagcgcaggtacctactgagtgcgagtgccgagtgccgagaaacgagtgattgggaggtatgagggtccgtgaggtgctgagtgactgttactgagcgatggtgaggtgctgagcgatgaagtatgagtgatgatatggccgaggggcggatttataatgatattttgctgagttttgattttgattcatttcatcttttacactgatacattgggagttttaccgagaaatatttgaaaatatacttgctcagaggaatttatttgaaaaatggttttcacactcatatattaaatatatacttcactcaaaccttgtattttactatttgcgaactggtgtattgtgatgtgtttcttattcttcagactgtgatttattttcattactactgagttggtgtactcatcattactccttgcacctctgtgtgcagatccaggcaccagttctaagcagtagtcgcatgcatccgtacgacatcagctcttgggatttcgaggtagttgtccagcgtccataacttcttcattttccctccctctattagtattagtactttgttttcgagatattgttcttatgtaagtagcagtgttagttatttttagatgctcatgatcattgactccagttttgggggaaattgttagactgtcgaatcttattatgttgcttgcagacttagcgtaaattcttatacttaatacgccggttattaatgattttgagaagttatattgaaatgagtgagtagttatgtgatggttggctagcctagttccacgataggcgtcatccaaaggcagatttgcacaaatggccctttttgggccttttttaaataaaaaattaacacatttttaatttacaaatttaaccttttgtaaaactataaatacagcccccccccccccccccccccccgttcttcatttcttcactcatttctcatttctcagtctcaattactctcatatgtttgggaacactttgaggtggtagaagaaaatgaagaagtttacaaagtaaagtgcaggaattgttgtataatcttaaatcttcgtccaaagtgcacgggcacacgctgtttaaggaggcatatgaagatttgtcttgagcgtccaccagaaattcgttctattaattgatttgagacaatttgtgttattttaatattattagacgtattattcatttatgcttaatgttttagtttgttcttttaatattattagacatataagtgcaagtttgagctttaatttgaagtattaaatgtaaactataatttgcaagtttgaagttttgaacttgcaaattataagtaaactcttaatgatatattcaaatataagaattttaaagtatttgcatcctttattcaaacactatttttataagtttatttttttgtttatatttttacgacagttataacaaatacaaaaaaaaattaaattttttttatatattttactgtaacctggcccggtaaacccataacccatacaatttagtttttacccggattaacccgaacccgttaagcataacccgtaaccggtccggtacccctacccgtacggttcaataatttcccagcccggccactcggttaacacccttaattgtgatatcttcttaaggtttttgataagtcagattgtcattcaacgtattgcagggaaaagttgatagaaattaagtaaaaatatttaattctttttcttcttaaaaaaatttcacattcaaaaaatggaaacttttattgctactgaattttgatcaatctcttagttcactttccaaccatgagagttaaaagaaaaagacttaaagcaaatctcagagacgacagtgcgttggatgatctgatgtcttatcaacacaaagaactcaaatgaacttaatacttcagaggaattataattttttaattgtgccttttccgaattcgtgtatagcgaaagtttaatgcatcatgttgccgttgaaattattctaatcgacccttcaatctctgttaagccatatatactcgcattcatcttctatttcatagtgggattttgtgtcacaaaagctggagtagtttgattatttcccttaagagtttttgaacgtatagttgaagataaaatgttagaactttggcaatagactagtttagacaatcaaagtctatattttgaaaattcaattaaaaaaatgaagtatatatctctggcatttgaggcatccaagcatagaaggcaggcataaagtttttgatggcatgcttcttaggtgtatcccgcacctaggcccatttggcgtcacgatacgccgccttgtcatatttttattactagatggtgtgagcgtgcgggtagtttggtagaatataaagatgggaggaccaaacctcatactcggcgtccgcattttctccatacaacaacaataacgatccagttaaatcccacaaagtggagtggggtctaaagaggataatgtgtacgtaggccttacccctaccccgatagggcagagaaactgtttccaatagaccctcggctcaggaagacggaaataaaaacaagaaaagaaaagacaatccattagtaacttaagcataaaacaagaaaagacaattcattagtgactacaacagaaaccgtcgaaacagtaacataagcttaaaagctaaaaaataaatgacatgcaataacagtagccaatatctaaggcccggggctaaaataaacatcaaggatagtgtggactcaacccgcatttgctccatatttatggaaagaagacctacatgtcaaggaaaactcaaatataaaggtaccttatgcccgctctattacactgcaaaatttactaacactactaaaggtgccttaggctagagtggtgctacacacgttgaacttctagttataacaatcattgttacaaaaagaggaagcaactatggctttttcagtttggcacaaacataaccaaatctcgtgcaatgacaaagcaaaatcgctccatataaattgtgcatatcaagatgcttctttatacccaaattaaaaccatcttgctctctcagtatagagatacctcattgagtagcctcgtctatatggtttcacttctaaatttatttaatatcaactttattaaagaagaaaggaacgcttacgcaccaataaaaaatatgacaaataatttaacatgatgagaagtcatgccgaaagtgttaagataataaaatatggtatatgtctatctacttggagcgaaattatcatatttcatcagctaatatcaagtatattcgacagatatgagtaaaaaagaactttattcatccaccaagtgatttaagatcatactaaaagtactacgttttgaccctctaattaacacccattcttcttaagcccttaaacaacacttatatatatagggggaacacactattaattcttcctttatagatgattcttgttagttacattttaagaatatggtgaaaagcgcgtaaacaacaaagtccattgtttagcaaacaaagactacaaccttactaatcagaactctattccaattagaatatcaacaaaaggacctagaaaaaagtggatagagagaaaatatattgaccatctcaactctattactatgtccgttttaacttacgaatagcaacactaacatttggacaaataagtaatcaaaattctaatattgtttcatttcttgcacgtaagataaaattctaatactgctctaagccatcaataagcatatctatatttgtatgaatataaaaaaaaaatctcaattcacaagaatgcacaactttacaccattcaaggcaaccctaatttactccataataggtaaagagaaacaaaaaattcttaccagctgaacacttattgtgaaccggagggagtagttatggtgtttcaggaatatcactgaatgtcttgggttcatccatcttcgtactttaaatctcatattgagtagaataccaagaaaaaagattaaagtaaaagaagagaaaaacgaattaaaaccgaaattgtctcaaatcgtaatatacaatatttacattgaaagaacaccatgaaagtatgtctacaggtataactaatactatcaataacaaaattttaagccccaatcttccaacatcaaattaaaaattacagatttttgcatatgcttgatttttagtaatttattagcggcaaaagtcaaaaagatgccaacaatcagtaaatcaaaataatacaaccacatgcattagtcatctattttcaaccatgcatgtgcggattagatagaattatagacttgtatataaacgatttagctagaaactatgcgaaaaagtataaatgcaatacagttcatgattgtgattccttctaaaaaattatttgtaggttcttgataagtcagtttgtcattcaacgtattgcattgaaaagctgatagaaactgaaaggaaacattaattctttccacattcgaaaagtgaaaatatttattactagttaattttattcgattctctcggttcacttgcaaacaatgagagttaaagaaaaagacttaaagcaaacctcacaaacgacagtgcgttagatggtctgatgtctcatcaacacaaagaactcaaaagtggacttaattcttcacagggataataatttctgaattgtactttttccgaatttcgtgcataacggaaatttaatgcactatattgtcattgaaattattctaagccatatttactcacattcatcttctatttcatattgggattttgtgtcacaaaagctggagtagtttgatcatttgctcgtaagatttttggaacatatagatgacagtaaaatgtactttcaattttcatcttcaattactgattggaatatattttatttctctaaaccatccaattattttgactttgtttcattaatgatataaacatactaagtcaaccaaaaaaaaatgagagacccaataatcatgccaatattgatgttcaaaatttttaaagaattccaggattataatttcatgtattttgtttttcttttcttcattcagatgattcacgctatggtgtacaaacagaaccgaaaaatctcaccaaacgaaaatcaaaccaaactcattaaaaagtccgattaggtttggtttgatttggtttggtattgagtaaaaaaaatcgaaccacactgacatataaatataaaaaatttatatatatttttaagattttatatagaattttctttaaaaatgtctagaaatatttggaattctcttacatgatataacatttaatataatatgaattgctttatatttattaaccttaaatactggaccttaaataatgggatatatgatcactttcttatcaagtgttactgaaatgcgtcaatctctttgttattccatacaagatctattaaatttttatatctttttagaatttgaagtgattattattattatgtatcgtattaatttttatgtttaattaccaaattagattaaccttaacagataacaacaacaacaacaaaattattgtcggacgactaaaaagataactatcatgtgttactaagtaagtttccccatgagaatattttaatagataatatgtttgtcaattttttaaaatttttactaaacatatatttacttatcaaaatttaacaaagtaagattgaaataatatttaagcaacaaaaacccgaaaaaatcgataaaatcgaaccaattcacaccgatatatttgatttggttggattttgataaaaataaaaaaccaacccgatccatgtacacctctaattcttgcaatccggctaagtgtgaacttgcaatcatgaataatgttaggcaagttgattcgataagttttatattttaattcctatttatttagttcgattctatatttctctccctaagaagtggcctggctcacagtaagtttatggatttttatgattttcttaaattaatatttcaataataattgagtttactgtcaaatatttaatgaattttttaatatataaatttgaatgacataaatgggatgcttatgtgtcactattgattttttattgtcatctcataagtaaagaaggcaggaataacctcaaaacaatataatatcttatacaaatatggtcaaaacaacacaaccctcaagatttaggtgacacaaatacacgaccaattactgaataagtacaaaggctgaatacataatcgcatatgtctgtaagaaagaaaatatatgagaataaaagaatcgaaatagtacagtagtttactatgaagtctccaataacacactcctactcagttaaaagggtactgtaatatcagtctcagaacctgcacaaaatatgcagaagcgtagcatgagtacatcatagtcggtacccaataaatattaagtctaacctcgaataagtagtagcgagactaaatgcatcaaaatacttacaacacaaatatctttaatagagcctggagctgaagcagtaaatacccttatgaacaacaatgtcgagataattaaacagtcaaaaaatataaagcataattttccaattcaaaagataatcataacgctgctcaaatatagtatataaaggtggcatgcttcaatcaacggagttgaggctcccaactagcttttatatatatatatatattttctttcatctcgggagaaatacgaccgggagaagctaattcaaacccttctggtaaaataagagcagcccccatgttcaacccctcccccccgccttaccattagcaagagcctgtttcagttgcatatcataaggaattcgaacaattgcttcaaaatacagtatcagaaagtaccgcttgtggaacttcaatctccacgggcttattgttattgtatttcaatgtgtgatttgttgccgtcatattgcgttccaaaatgtataatgccttattgtatttgttaaaacactgatatttgaagtactgcaacatcaatatgggtcaatatattttatcctgggaagaaatgatcctaaattttggatactagaaaagaattaagttccttcaggatacactgtaaaatcagcggacttaattttttgttttcgtatgcatttgtttcttttttttttccttgcacaaaaggtttaataaattctacacacaaagtgagaagtagtctaagtttcttatctaagcaataaactaagtgaatttttaacaataaaagataaatcatgtttatgatgtcacaatataatgtcttggattagctagtagaaactcacaaactagtaaaatctaatttaagatcgaaacgtcaaattacttttatgaaaataagctagtgataatgtaagtttcatcttattcaatagtattaattcataaatgtcaggacaaattactagcatctggtttaatttcatgttttttttttatgtacagtcttttatttccttggtaattggacatgacaatttactttttaattacaacaacaataacaataatatacccagtattatttcataatgtaaggtctgagaaaaatagtgtgtacgcaagattttcctactttatgaggatagagaggttgtttccaatagattctcggttcaggatagtgtaagcaccacttctaattactacgtactatttgtcttttacgaaaaaaatatttttccccccgttattagtcaaatattgaggggttgtttggccatgtaaatttttttgtcgaatcggaaccaacatcactgcattgcgctcgaacagttgagcggccgccggccagcaacttccgtgcacagatatagattcattcttcgtacctggtccagcctcacaacccttcgcatttttttttctaaaaaaatcactttttccaaatcagcgtttgaacatgaattcttcaattttcacttgacgatgaattttaaaattttctgaaaattttaaaaactccaagaagctgttttttctaaattttcactcaaatcattcacaaaatttaaaaaaaaaaaaattatatacatgttcaaacacaactctaattttcaaatatcacatcattttcacttagaaaaaatttcactttttttcagaatattacaattcttacgtccaaacgcccaatgaattatcaaaaaaagaaaagtttaaggaattacctaacctccataaataataaatggaattaattgttaaagctaaatagccgttaatgttgcccgtttcaactttacgcggttttctttattacgcgcgcggggatatatatatatatattcacacagtcacacacttcaccttccatttcccttacatccattcacgttctctacatctacagctacattttcacacacacacacagtgacgcgggtgtatatagagagagagaactttgactctgaattctcatttcgatttttttgaatctatagatttgctgatcgctacacaaaatggccgatcgagtgcacccagtggatataccatcgacgagcaatccaccgtcgttgaacagctccggcgaaataggttcaccaaaacaacctccatatccatcgccggtgaagccagttccgccgccgccgggaacttacgtagttcaagtcccgaaggatcaaatctacaagtatcctccgccggagaattctcgccggtacgaatctctcaccaaacggaagcctcaacggagctgctgctgccgttgcctctgtttcactctgctcgtccttcttattttcgtaattgcactcggcgtcaccgccggagttctgtacctcatctaccgtcccgagtcaccgaaatatacaatctccagcattgcgattaagaatttcaactttacggcggcgaattctacgttctcgcctgagttcgacactgccgtcagagctgaaaaccctaacaacaagatcggaatatattacatgaaaggaagctctgttacggtagtatattccggcgttgacctttccaccggggtgttgccggcgttttttcagccggcgaacaatgtaacgatttttaaaacggctctaaagggttcgaaggttttgcttggaagcgccgttaagtcgacgttgatgaatgagcagaggaaaagtaaagtgccgtttaaggttaatattaaagcgcccgttaagattaagattggtgccgttaagacttgggaaatcaccgttaaagttaactgtgatgtaacggtggatgctttgactgttaagtccaagctcgtttctaaagattgtgattatagtgtgaggctttggtaaaaagagttttaacatattctgatttgatttgatttatttaaaatgtagagataattatgttatactactttctttctcttttaactgagaaaaatggctgtattttatagattgaagaatgttagtgattcatttagaaaactggaatcacaaaaatatttgaaaaatggttgtacttcttcctcattctttttttcttgagttaaaatggtccaaaactatcaagtttttgtaagttttttatttaatttattcgatgtctttaaaacctattaaaatcttctcattacatttttagaggtgcgtctagtatacgcttctaattatctaaaaaaatgtgtaaggtaacactacatgtgtatctggtgtcccccaaacctcccctccccccaactatatcccctatatattatctggtgtcccccaaacctctccccccccatccccccaactatatcccctatatattatctggtgtcccccaaacctcctcccccccccccccccccccccccaactatatcctgtatatattaaaatcacatgttggacttttaaaggtatgtctgtctaactatattaacttatggtttgtacaaatatttttacatagtttactcaggatgcattactctcgattgattaattaattctaagagttttggccaaaataatatctaatgtaatgtgttaattttaggtttaattgtgattgagctttaggttagactccgattgataagtctttatttatattcactttgtagcacaataaaacataaataaagacatataaggtgtgtttgatatgaaggaaaatattttccaagtttcccatgtttggttagcttaaatgttttgaaaaatattttcctcatcaactcattttttcttaaattgaaggaaaatattttccctatcaagagaagagaaaacattttccaaaactcattctcaagtttcctcaccctattgcttaccctcaccaacacaccccacacccacccacctaaccccaccccatgcccactctccaaaaagatttgtttcgtcaccacacacccacacccccacttccaccccgtaaaaataaatttattttacttttttttgtaatttttaaatttctgtttctttttctgcactccccccactccccaccaccccctgcccccactcccccccaatttttcttttgtaattttcaatttttttttgtttctgcaaccccacctcccccctgggggaaattttttatttatttatatatttccagttttatttttttcatctttgagtttataggttcaaaattttacaagtttcacagttatgagttcggaggtttatgtgtttcgaagtttacggctttagaaattataaagtttacgggttcaaaatttcgcgatttcgaaagttttgcggttcaaatttttatgaaatttgtgggttcggaaggttgttggttcgaaagtttatgactgtttattgtatcaaaattatttatgaatactttgagaaaatatttttcttgatttgcataccaaacaccgagaaatgaataagattactacttgttttccaagaaaatattttcttgaagaacatttttcatggaaaacattttcctttataccaaacacacccatagtgttgtatttcttaaaagtcatcttgtattacaacaaaagattacacaaaataaaattttacaaataaaaaatcaattgttcagcaattatattctctaattccatattacataaagaaggttcaagagattcaactttattttttacaaggtgttgagtttaataaggagaattaaaatggtattctttaaacaatatgtgtaagacatgaaaaagactaaaacaagaaagagaataaataatttcagaggaaacaagagagggaaacttttttccagaggaaacctatatggagagctgaagaaaaaaggttaaaacatgaagaagaaggtgaataacaaagaagaaaggtgaaaaaataaggaaggatggtaaaaaaaaatgagggagaaagatggatataagtgaaataaggagaatatttatttaaaaaaaaattaaaaaaagagggttaggttagttagccattattttctgttaggtgggctattttaatggttttttcagctacacgcgctcccaagcgagtatctacacatgttatgtcaggtcagggacgggggttttataatacgagcgacgatataatttaggggatttttaggacacggaatagtttaagtagcaaactgacaaaaatatgataatttaagggggtttaagggtattaactcttcttccttacgagactttgtgggcgtttggacataagaattgtaaatttccaaaataaaaataaagtaacaaaaggttttaagtgaaaatggtatttgaaaattagagttgtgtttagacatgaatataattttgagttgttttttaagttttgtgagtgatctgcgttaaaattttaaaaaacagctttttggaatttttcaaattttcaaaaaattttatagtgcatattcaaatgaaaattaaaaattttatgaccaaatactaatatcaaataaagcgaaaaatttcttatgtccgaacgggcttaacaagtactagtactaaaaattttgggcacttttactagtactaaaatacacatagtgcgtttccattttaagtataccttagttatgtggcgtgcctctaagctttaattctaacaatagaatatttctatttatgggataaacacatgaaaacacaatgaatcttgaacttaacggtctcagctctaccctaaaaagatagcttatgacataagaatcgtccaaaattataataaaaaccaaactccctaaatctcatgctggttccataacagagcatcatgaggtggtttcaagaggagactgaaaatgaaatgtaagaactttcctttttggcttattgtgaaatagtaagtgttcaaatatcttatatttgtggaattaattgaggtacgcataagttggtcacacaacatatacacagatggtaaagaaaacaattgccaacaaaaaataacacctaagtatacaatcaagcacaataactcgaatacctattacacgtaaacctaacttcaatttaccaaattaaggttcatctcatgtagtgattacgaactaactcaatgtcgataaaaaaactcaaattcaatcattactcggaagtcgaaacttctcaaactcttcttacttggtttgtatggggtgaattgggcttctcctaattcccgggttgaagaagttgctccggtcccggattgacgaagtgaacctcgcttcactgtccggggattttatgatttcttttgctccaatatcggtctggcaaagtgaaccttgcttcgttgtccggaacctgagcaccaaactccgattcttccgtttttacttcaatttgcatgtaaagtctccagatcattttcaattgactcctacacatataaatacacattattaagctcgagtcacaaatattcacagaaaaataaacaagatcgaggtataatgcaaagaaaaaatcacctaaacgacaaaaagaattcaatttccgtcacataatcaaattcatttttcctttctccaccgtgtagtgcataagttacaaataacttttgactcaaaattatatccatattaaaatattccctaaataagtataaactaataaattttaaaccatctaaatcaaatgatttatgatagaatttcgaaaatcaaacacataatgttcaaatcctaaatcctccttcattccccacctaatgagatgtagcattggtggattaatcgaggagtgtgctaattaagtaggagtgacaaacgggcatgtcatgtcggatatgagctggttaaaaaatggatatttaaaaaaaatggataaattattcggcccgacccatagttagtacggataagaaacgctttatctggcggataatatggataaccatattatccatagcttcatgaatatagtcactcttaggagaattcctagtctcccaaccttgagtagaccctgttagtaatctgtatttgcaaaataatttatggagaaaattaaataacataaacagaaatgtaaatgaaataacaaaaccaattcgagcccactgaatatagtcactcttaggagaattcatagtctcccaaccttgagtagaccctgttagtaatctgtatttgtaaaacaattatggagaaaattaaataacataaacaaaaatgtaaatgaaataacaaaaccaattcgagcccactgaattcacagtgtttccttaaagaatttaatcccctcatagtacccaaagttatggattatttcctcccaggatataatgaattacacactggtgtagtggtacttcaaaccccagtgtttcagcgaactcaaagtttcgtagcaaatcacacttactgttgctttctttgaagttaaaagtatgcagaaagaaggcggagaactcataaattagtatataaatatgagagaatgaacttgtatttatagccaaagttgggctgaaatctgaagaggtgcaactcttcagaatgactatttttgcaaaacggccatagagtaaatgacatgacataattggttatttactcaacaataaagagggaaaattgaagggtacttaattttctgttacaaaaacagaaaactaatatttattttaatattaatattttgttattaaatcaaatatttaatagcatttctgttaataatttattattaacaaataaatttggtccaaaaattaatcaatcgatcgatttgaccaaatccgaagccgaggccgagcgagcgacgacgacgacggcgcgaggcttgccttcttctcaactctttatgagctagaaaaagagcaattgcttatatacccatcaaaaaccctttccttttcccatgtggaaccatctaggagggaaactcaaatattactcaaatatttcattttcctctctatttcacatttaccatattttaagcattaataaagcattaataacttaaaaccccaacaaccctaatttgaggctttcaaaatataaagttcaacccattagttatccattgattatttattttctaactggataacatggttcttatccgtattcgaaccgttttttttaaatgttcattatccaaccaattttctaatggataatataggtggataaatattttcttttaactattttgccaccagtagtcacgagcgtaaacccattgacgaaaaaactcaaattctctcacataatcaatttcactcatcactcgaaatttctcaatttcttcttaatttctctacctaattttcagtaaccaaagtagtagctctccccttctttaagtagtgcttttttcttaaatatattgtccatatgtttgtacttatcgaaagtggtttaattttaaatacttattaaataatggcttaggtttaaatagcagccccaaaagtggctatgatgcactaggcccaagttaaactgaaagactttagcccaggcccatattcaatattgtccgtgaatcgaattgtatattttctatttttctttgatatattttctttttatatatttctaattcaacgaaaaactttatcctttttgctattatttaatggtaaaactctaattttaggacccatttgaccattagttttatcaaaataaatttaagatttatttagcaaactcatgtttgaccataaattttgcccacattttggcaaaatatcaaattccaaacttcaaatcccgaaatcacctcaattgctgattttgggctaaaatctcaaaatttgggaattttatacatgtttttccacaataaagttgggaaatatgttctgtaaacgtatgtcccaacacattttcatcttcaaaccaaacttcacccgaatcaaaaattttaaaataaatttaaaaatctacggccaaacgctaacttagcgaataattgggtcataatattgggtttgcttccaaattttttgctcatttcgattttcttttactagttaataaatgttcttattatttgtttctattatagctcaatgttttgattgtataatactactataagattaagtagaaatggtgatttctctaaagaattcaattgactggctactgatttcagatgcaccttatggcaatgggtgcggggggtgcagtcactgtctttgactttgcactctatgtatatgtttctctgtgtgtttatatatactttcgtatatattgattactccaccgggtacctcccgttcactagcacaggtatcaggatttgaacacgaggcggaaccaagattttaatgttataagtttttaattttagaccgacaatcatattatgagttctgaatttagtattttgtgcatatttaatggtttttctaacgcaatgtactgtttgaacaaaagcggggttcagacaaacccacacccaagcttctcacgaatcatgagttcattcggacccagtattttccgaaaatattatctgaatccaaaatttaaaaaatgtaacgaattaagtactaaaaaccttaaagatcgtattcatcgttcacttgtgttactaatgaggagtgggtgcaatcggattttgcacccattaagaagggacatttgcatctatattttatgacaaccttttaacttatacatgttttgtaaaaacattacaagtgtacccactttacgcataacttcagacatacgaatctgaagtagcaaaaatttaatgttttgcctgaagtgtagcaaaacttaatatatttttgcatgaagtttggcctgagttgcaaaggcaatcacgcaaacttcagttcatagtgcaaatggcaattttctattcaataaactacaacatgtttttttaaaaggtaacagataaaactacaacatgttttggctaaaatttttgtttataattgctgaacttcaacattctagtagtttaagttttgttatatatttgctgaacatcaacatgttttaactgaagctttgttctgtatttgctgaacttcatcatgttttggctaaaatgtttgtttgtaattgctgtacttcagcattctaatagttgaagctttgttttgtatttgttgaacttcaacattctaggagctgaaatttttgtttatatttgctgaacttcagcattcttagagctgaagttctaaacaataatgaatttaatagatcatgattaacagcgattgatattgttcatttcaaatattaaagaatgaaaaatattttcgacataaaaacaagttactacagataaattagaacaaaccaatgtgtttgtaaagctaaaatatctaagaggttaagttattgtgaatacgaccaaactgaacataatgggacaagcagatatatatatatatatatacatgaatcatcgggccagaacgcataacaatatctcaagttttaacattcagaaaacgaatgaggagaaggaggaggagaaagaggcctaaatttgtttaaacagtgggtacaagttaaaactttaaaaaaaagtaagtataagttaaatgggggcgaccaaatagggcgtcccgtgcaatttttaccattaagaatccttgatcagttgactgtgagcacctaatttttgccctaatgcaaataactcataaaaaatattccaaaagagtttagagttgtttgtgcatatatagaggtgttttaaaaccatagaaaatcataaaaaaatatttgattcttcatgtcatagcattttagatcttaattgcatttagaatttaattacgttaattaagtgtattatcaaatgaaaagtcacaaaaaataatatacaaggtgcatcatttagtttctttaatgtgtcaaatatttagttaattagtaggtagaataattaattaaggtaatttgacaagattatatttgaattaatttaaggaatttttacattcctatgccaaataggaaaccttattaccctaaatgtttaaggtttgacttaattacacttagtataccaaattaccaattatataccataatcaattaaatgtataattaattgtacgtttttactccttgattaaaggagtccgtatatcccaatatctcaccatttccacgtttctctctccttacccctcacccctacccacgttttacccatacccacgttcttattactgtttcccctcttctgaaaccaaattctccctctaaattcacagaaaattgaagacacccttcaacaaacttggttccccattttactccagttgaagttcatcaatgaaggacaacaaagcttcgaaacaaagtcctaacaaatctgaagtagctgatataccctcatttgatttgggtgtgttatcaccaaaatcacccaaaaagcagggcaaatctccacatgcaattgcagagactactcatagttccctcctcgacaaatcagagctgagatgagaaccaaacaaaaacatgatgtagatgtcggagaaacttctacagcaggctaacaagttagacgaaaaggaaaagagattttggtatacgacgactttgtagaagaggtgcctaatcttcgaacaggaaagagagcaaaggtgtctcatggttcgaaaaatcaaaaaatggagaaacgttcaaaaaaataccctaaaaatgttcggaaccaatcattggtgaaggtaaacatttattaatttcgtttctaattttttagtttggtttaggatggtaaaattcgtattatatgtgttttagacaagtgtagaataattgtcttaattttgaagattatttgtagttgtgatgttctgcctttaaatttgtagatattttgtagttatattgttaggtaacttgtactatttgaagcagaattgtagtttttgcagaatggatttctataatttgatttgaacttgttgtagattttgtctttttttatgatttgtcacttaagaaaaaataacgaagaacagagtttttgcaaaaacgagtctctgtaatttgattttaaattgaaaataaaggattttcgtttcaaatttgaactgaaggtcgctaaatctattagagtattctgttcctaatttgtagcgcgcctaattatgaaggaatcaactcataataagtagtatttaatgaatggtatactaattgtagaaaaagtgtgaacaaggcaggtaaattagaagttatgtacatatttggtaataaagtttcatatatggtatatgaaggaaaaaatcaccttaaatatttaagtggtcatatatatggacttaaagcaaaaaaagctgttgggccacgccacgaggcccaaacatttcgaataatctgccccagcccatatgcctaaaaccctcaacactcatatacaatctccatcctttttccaaaaaaaaaaaaaaaaacaaaaaccctagccatctttcgattttcctcctttctaaagaaaacggactcagaaacatccaaatgaagatctgaaatcaaataaaagaagatctgaaattcgaaggaaaattggaaagtaataggttgctgaaattcttttaaactctttttgtttttcggatctacaaaagctgtcgaagctcaaattgaagctgttttgctgctgattgttgcttgtcttgaactggaaacggtaagttgagcttcaaccaactggttctttgcctttatttggctttcttttgcttctagaattaatccttgcaccattaggtatgtcttccctaaacttgtatttcagatttggcttaatatgaagtcatgtttgattccgatgcttattttatgttgattggaattttctgtttcaacttgcttcagcatgaacatgtgtcatttattttacttgaaatgtggtgaaatgacttaatttgtctttcaaacgaggtccataatgtttaaattgatagtttgcttagctatttaatccttagatctgtagtggtacatggaaaatcagtgtgtttttgattttttttgtttttaaaaaaaaaaggttcatgttgggttgagatgtttgtgaagctagaatcagttacctactataaattggttatcttgtggtgattattgcaacaggatatgatcataagaaaaggaaaattattgattttgtagggttaattcagaaatgatatccactttactctctcgtagttgtgtgatcaagttgaatatgatttagttaatctcatgatttctcctctatgaattaattgaggccggaacatgccactggatttaaggtccgtaaggagcattatcgtaggcttagggagcagacagagagtttgagtcatttagctgcttattgaaattggaaggaagtgaacttgaatcttgattttgcaattaaagagctgtaatttgtgatgtgtttgaaaattttgatttatcctaaagattggaacaattcattgtgatttaatttgaacatctctagtgatttggtcatcacatttagtccataatcttaacttttacttgtagtcttcaactataggaaataaatcacaaacattcgtacaaatgcttttaggcgcgcatttaatcaaattatcgtgattatatacattcgcgggaagtaattacgatttctaaaatgaatatccttagaaatgcttttaggcgcgcatttaatcaaattatcgtgattacgtacatgttcacgtgacacgattacgatttctaaagtgaatatttgtagaaatgcttttaggctcgcatttaatctactatcgtgattgtgtacacgttcgcgtgacataattattatcttccacaaataaatcaaagtacgcgttctcgcgactttgaccaaacaatcttgataataacaaagtgttattaattatgtacacgtatgcatgacatgattcttaactcaccaaataaaacgaatacacgtacgcgtgattgtttcaagataattccataattacgaataatcaagcaattaaaagtggtaaaaggtaaaatgcacgtatgttattaaacacgttataattcaattaattaagccatgtatgattaaaagcgaccgtgttaaaaccacggaatccgggaatgcctaacaccttccccgggtcaacagaattccttatccggtcttctgcgatcacatactttagaacatagtcaaattttctcgatttgggatttaaaataaaccggtgacttgggacaccataaaattatcccaagtggtaactctgaaattgaataaataatcccatttcgaataatgtcactttaattggaaaaactcccctatcccctcgggaaaaaggaggcgtgacactaattatagaagttttttttggtgtggtgggagttctctgtctctaacatggatggaaaggtagagcttttggttgtcgtagtgtgaagaaagttttattgtctgctagaacttgaaaacaactcctatttctcgttttggcataaaagcaggatcttaagacttagctttcagtctcttggttcacaggaaaacctatgtttctttgattagggcggaatatttcgtcgcgctgaatgtaaatgaagacactaataggcatggttgaaacttagaactgatcatctttatttttgttttaaagtaggttttggggtggttactgatccatctttcaaataaccaatcttgatcagtttggcactatagcttgccgaaacatagttaattaaactatgtgaattcctgggatgaaatgtgatacctatttctgattatgttttgaaaaatgaggtttaggttttccacgttgaaccatagttttagttctttgaagtgcaaatttaaagtagtacttttggaaaacaattgtgtttgtattaggattggtgtttggtttcaaaatgttttacatcatgtccaccgctcttttggatcttgtaatgacagttgtaatcacaaaacaatagcagttgtgacatgcattcttgatttctatcccagcgtgatttagatatgggttttacagagtgcagtttagctttcatcttttatttttattttattgaaggtggagaagaaaacctatctaaagagaatgaataattagcaaaagagaagaagcaaaagagattagatatctgatgatacaaaagaatttgggaactacggtttatttttggtgcattttgtcatgagaatgaaggctaatattctatgatacaaaaaatgtgaacttaaatggtctttgcttctttgattgatttgttcagtgagtcatatcatcctagctgactaactaaattcctagccctaagtttcttagactgctaattattttggtacacagcactttgatggtcaccttcttatcattagcgttttttatttgtatatctctttccttctttaaaatgttatctaaattgctttggtgacttttgtaggtttaagcatcagtctactttaagatctgacaagtgaattgcttctgacttggcaacatggctagtggacctgggcttgagtctcttgtcgatcgtatgttttcttttattaattctattttttttctttatgaaattaatacatatttttgttcagaaattagcacaattttaacagaatagcactctttgttttctttcttttggtgttccagaaaccatttcagttattacaaacgacgggcgaaatatagtggtgagttatatgcatttccctgttattgtaaatcttttgactggagactcttgttcttttactgaccaattggttctttgtccagggagttttgagaggatttgaccaggctacgaatttgattctcgatgaatctcatgaaagggtgtactcaacaaaggtctttcttaaacccttttagattgccataatgtctaaacatctatatattctgctaattactactcgcagttggtacacgatctccactagaatttgtttaatcatattatatgtcaattcccacattgttgctacgggtagtacctttagctgtgaagattataagctagagttcccagcactattctgcatctacgttggattttatttcacggggatgtggctacaaattacaacccgacatgctttctagacacgattgttgacaaaacagtgggactggaccatcctgtctttttagttttacctggaccaattcatttatttgttaggtgcaattttgagtagtatgttttgcttaaaattgggttcagtatggagggggccatcatttgaatagtctcttctagcttagccaaagcaatttataaatgtatggctctggagaattacttaggaatagaataggggaatctaaataaacaactacgttatatacgatctagagtgagtaaaaaaaagttatgatgatattaaagagttcctgctgttattggatgtttctccttttttttctttttttcttttttgatatgtaagttggatgtcagccttgtagccaatagagttgaaacatagatgaacagactggaatgtatttgttgtcagaaaatcatatttttttttccttttcttgcagtttatactgttaagaatccttttcccttctttctcattcatacagtggtatattcattaatccttgataaattgagtggtattaatgctagcttttattatgcaggaaggtgtacaacagcttgtgttaggtctttatatcatacgaggggacaacatgtatgtgtaccattggcttccctgtcatttattaaaaagatgtgcataggtttcttatagatctgccaaaaaaaggaatctgttttccgaatatgttttccctaacaagttgttttccttcattgttgcagaagcgttgttggggaattagatgaagagctggatgcaaacttggatatgtcgaaactaagagctcatcctttaaagcccgttgttcattgatctgcatcttggcatgagtttgtaatgttggcaatgacatggatcaaacgttggttacgcaaggaattttggtacagtttgtagaattatattcagatgtgttacgcacctttgaacaaagttttctagtatgtgattcaccgatgtatgcctttggttcctttgaacaaagttttctagtatgtgattcaccgatgtatgcctttggttatgctctacttttctgtaagttgcatttggtacagtcttccagttatgctctacttttgtcccaaaactgagtctggtggctagtttctgttgtggttacggatctattgtttctgagctgagggtctcccagaaacaacctctctatcccttcgtggtaagggtaaggtttgcgtacattctatcctctccgaaccccaccggtggaattctactgggtggttgttattgttgttgttgagtctggtggctagatcaaatgtgatggttgattctcataagccaaagcatgggttttcattgaaaatatatgtgcttcctaagtaacaagtccaagaaaaagaaacaagtgtcaactcccatcttcgttccttcagttaaaaggtaataggggttgaagagggatcagagtagggctatacacaaagggaaacgggcaaacatgctaattttgagagcgcctatacagtgtaattttcccttcttttttgttgtttttggccatacgtgctttagtttggccggaatttgcttcagaggtatggtgaggtgagtgcgacacttatatttattagtttggtgcattaaaatcccatgcatataagtatgaaaaattaaaggctagtatgtacatgtctagaaagaactacttccataactttgacctgtgacctcttacttggccatacagcaactcttacctctgcatcaagaattattaacttttggatggatgtagaagcaattcaacaaagggcaaagcaaaagaggcaaaaatgataatattgtttttaagtatatggttttgttttttgtgttcagaaacgttcaacgaatttttttctcaatccaatatatgttcaaataataatacttgtttctaaaaaactagaattgggttctaaaagcccaagctagatattttatggggattgttacacaaatggccgaccaaatttattgtatacttttttaagttggtatacatagataatacattgattagacatattaatacatatgttatacatgaattatacatatattatactttttcggttatttttagttgagataaggtgggtggctatttggattaattcttcttattttttttatattcatttatggtagaaatgacaccaggtagtcactctgttattcaagaattagtccgtgtgttctgaatgttagtttttcagttcaatttttcaggtaaaaaatgtcctaagttgtcctgaagttaagatttttagtttaatttttcaggacaaaataagtatggttaatccctaaatagcatacatgacaatggttatctgtgcactttatgtaataactttttaaacttgagaaactactttgaataattaaacaagaagttcaaacagcatttaaccaatttcagggaactccaaaattcagcagttcatttcgtacactgctaaacatgtcgagaactgtcaaagctccttagaaagcacttatttatgaacatgttgtttaaaggcatgctatacataccaagaaaggagaggaggggacagtgtcctcaaagaacttttcagcgatgaggccaacatcttagtgccttgcctgctttgaagcgcaatctaaataaggcgaagcgcctgccttgaacttctctgagcttaagcgcgcctcaaatgttcaatctattgcgctaggggcggcaatttaagttcaaactcatccaacccctccaatccacccaggattaatgggttgggctaaaaatattttagctcatgggtcaatttgggctgagcccaagttaacccattattttttatagcccattctgacacattaaggtaaaagttatgtggggtagccactttttaaagtggtatttgccttttatccataatgctgagcaaaagtagccactagtctattaaaattaatatgaaaagattgtgttacccttttcttcccaaacggaaaaacgccattttcagattcattccttacagctctacttctccttttgcaatggggttctggcgtttgtatgagtgtttccattattttcatatgtgaaattcaattttgaacagaagaaacgaattgcttaatcatataaattttataagcctctaaatttcttttgtgtctgctcttaggagttgaattgcatagtaaaccattcactcataataatcacagatgggggaggacgtgacttttggttttctaaaagaagtgacttttagattttcttaaacaacagataattaggaaaaataaggtaaaaagacaaaattgaggacaaagataattgtgttaaggaatgtaatcctgaagtcttgaagttaagttcaaaagttaaggacatgtattcctgaaatcctgaagtttagttcaaaagttaaggacatgcagtccttaacttacatttacaagttcaaaagttaaggacaaccagtccttaacttacagttacaagttcaaaagttaaggacaaccagtccttaacttacagttacaagttcaaaagttaaagacaataggtccttaacttaaacttacaagttcaaaagttaaggacacttggtcctgaagtttgagttccaagttcaaaagttaaggacacttgttcctcaactttgacttataagtacaaaagttaaggacacttggtcctgaagtttgagttcgaagttcaaaagttaaggacatgtagtcctgaagtcctgaagttaagttcaaaagttaaggacatgtagtcctgaagtcctgaacttagagttccaagttcaaaatttaaggacatgtagtcctgaagtcctgaacttagagttacaagttcaaaagttaaggacatgtagtcctgaagttatgttcaaaagtcaaggacatgagcagaagggtattttcgttcggaaagttaaaatttattaaagcagtggctaaagactaaagacattttaaacagtggctttaaaataaagacagcttctctcggtggctatttgtgcacatcgccccaaattaagcagcccaaatacaacccatgacactcacccaaaataaagggatctcaactcaacttatctagaaatttacttagttgtcccaattttattttagaatttttttttgtatttttcattttttttcctgtaccacccacccctacccccaccacccccgtgcgcaaacaccctaaaatttttttacttttttttttgtattttcaattttctgttttgtcacgatctaatttcggagtcgtgatgacgcatgtcgtggaaccaggacaatcacctatttataactaacctagattggattactagagaaaacatcattttaacaagtatgaagatattaacagtagtaaatctgaaatttgaaacaatctatgaaaccaaaacttaaatcctccaaatctgggatccagtgtcacacagtcatgagctgctaatacataacataattaaaagaggaatgaccaacatagtctgaaaagtaaataacgacagggagaataggaaagagatgacgagatcacggtcgccagctgctaccacgacaactctgatgaaactgtcagctactcaatgaccagagccgagtcccaatgtacctggatctgcacacaaggtgcaaggtataacgtgagtacaccaactcagaagtaacgaacccaaactacgggctgagaggtagtgacggactaaaccttcggtaatttgaataacagtgtatagacttgagcatgacaataatgtaactgataaaataatgaaatgtatcaattatgtctgtacaacctacatgccagtatatgatcatcagtaagcagaaatagaatgtacgcaatattctaatttctcacaaggaagtccactcagtactagaattgtccttcaggcccagggaaaatccatcccggattatagaagaacacaaggggacgcaatcacctaatactgaggaaaaggccaatccaaccccacagagaagatccatctccggaatatatcactcggacaagatccatgtccagggacgatccatccctaaatatatcaataacttcggacaagatccatgtccagggaagatccatccctcaatatttgtgcgctcactacaggtgtaaagactccagaggggctcctataagcccaagcgctatgtcaagccaacgaatgcatgattcaaggatcgctgcagtgtgcagtccgatctcatagctatctcaatatcaggctctaagcctcactaagtcaataccttccagtctcgctcacaaggctcttagatataagaatcagcccaaataatgacaacatagaaataaactaacatttactgagactgaggcatgaaacatatactataataggactgagtacgtgaaagcaaatagtcacagatagagacaacaacaattgaccattccggtctgaacacattgggcgtgaagccttagcatttatacttatcatgatttctaatatgttcaaagtaattacatccttcatagtacaggtatcaacctgaaatgaccggtagacggtgccatgggatgagcctggccacaaacattcggtgtacgcccgcatgcccttcatttggaaagtgcgtcaccttaattaacatcaaataccagaaaatttggggcttcgaaccctcagttccaagtttggaaacgttacttacctcaacaccaactaaaatactaccccgcagtgcccttgcctctaaattcggccttcgagtgatccgaatctaccaacaatcagatttataccattataatatgccacagaatgaaacccaaccgaaatttataaaaaatgctcaaaaatcccgaaattggtcaaacccgacccccgggcccacgtataggaattcgataaaatttacaaaactagaatccttatccttccccgagtctactaatatcaaatttaccaaaatccgacctcaaatacccgttcaaatcatcaagagaatttcccaacttttcttcccatttccccccaatttccactttgattcctcaatttacatggtaaaaatcaatactaattcatgaaattagactaaaagtgattgaaggacacttatcacaagaatcccactgaaaatctctccaaaaacctccttctcccgagctctctaatggtcttttgaaatatggattaaaaccctcgtttttagaacttaaactttctacccaggattttcgcacctgcggccctttccctcgcacctgcggtccgcacctacgctcaggaggcccgcacctgcgctcaggagaaccgcacctgcgaaatttcgttaaaccgccaactctcgcacctgcgacccaggcatcgcacctgcggctccgcatacgcgcctaagagaccgctcctgcgattttcctccaggacccttgtgcccgcacctgcgattaccatggccgctcctgcggctcgcacctgcggtcaaacatccgcaggtgcagaaatgacagcaacagaaacaccagcagctgaagctgcatatttccaagctcaaaattcccgttcaccatctgaaatcaatcccgagcccctcgggaccccaaccaaatataccaacacatcataaatgatcattaaaacttaggaaacacaaacagtggcacgagaaactatcattcgccttactaggatatcgcaccacggtccgcacatctaccggggcaaccccttatatgctggtttatggtacatatgcggtcattcctgccgaggtagaaattccttccctgaggatcatacaagaagctgagctcagcgacgtagaatgggtaaagaaccgttatgagcaactagccctcatagacgaaaagagaatgaatgcggtctgccattcaactctaccagaataggatgtccagagccttcaacaagaaagtcaagccgagatcgttcacaccagggcaactggtgttaaagaaaatctttccacatcgagacgaagccaaaggtaaattctctcccaactggcaaggtccatacatggttcaccgagtgctgacaggaggagctcttatactcgcagaaatggacggagaagtatggccaaaaccaatcaattcagatgtagtcaagcgctactatgtgtaattctttatacttttatcaatgatgtaaattgaactacgcctgacctgattcccgtttaagaggggatacgtaggaagccctatgggttcggtcataattcaataaaattttcattctccctgcaattggaaactggggtagaattttgaggaggactctcaaaattccgaagcaagttcagccgatcgccgcacgagcaacaatcagaggcatcgacccatcaaactggggcagaattttgaggaggaccctcaaaattccgtagcatgagagtttacaatgtctcgaaccgtgtcacggtcgtcggttcatccaaaaattattttaaattatacattatgttatatttttacaaaatcatgcatgtttgtccttgaaacaactttgtttagcaaactctaccccaatgatacagacagtatcatcaaatcaagccgaacgagttaagcaaggccagcggggatacgaactaaccttcccccctcacaaaactcacgatttttctttggatgcaggcactaaggttgcaaaagccccaaaacgtactatctgcccaaaagacaggcattgttcaaagtacgattcttaaaccgttacacttggagacatttgctatcaacacatacaaataatgttccatagtcaatatgctcacagtaatcgcactgccgcagtccgctatcagctaagaaactctactatcgtttgttattttattgcataaggctaccattctgcctaccgagactaaacgttgtctccatctacattttcatctctgcataaggctacctttctgccttccgagactaagtactgtctccatctacattgaataaggctgccattcagccttccgaggttaagctctacctccacctgcatttgcataaggctaccattctgccttccaacttgcataaggctacctttctgccttccgagactaagcactgtctccatctacattgcataaggctaccattctgccttccgaggttaagctctacctccacctgcatttgcataaggctaccattctaccttccaacttgcataaggccaccatgctgccttcccttgcatagggctaccattctgccttccaagactaagcactgtctctacctgcatttgcataatgctaatattctgccttccgaggctaagctctgcctccaatttactttttgagactaacctctgtctcaagcactattgatttcgccttcttttcgggctaagctctgcccgttaattcgcaagactaagctctgtcttgtcagcatcatactatacattcttcatgggctgaaatatcgccaacttatccaaaggcgtcatcattcggaggcaccatcttcatggcccgagaacaccatgccatggcctgaggatctctttaatattttgcatatcattattcaaaggcgtcatggttcgtaggcatcatcctcatagcccgagaacatcatttcatggcttgcgaatcctgcatcgagcaattcatggcacaggacgtcatggtctgaggacgtcatccttaaccgtccaaagacatcattcatggtccacgggaacttacatcacgtttaaattacgcacaatatatgtttgtatcaggtaatcttgcaagcaacgatcccgctccagttctcctaaccattcctataaaccgtttgtccatctagtcctatgtgttgcgtccgttcttacaagacttcatcggtatacttcaccgatgactcctgaactacatatggactgattcctgtaaaaccagggatatgtaggcaactgagaaaccagggtgtggcctaaatctcttcaaaccgtttcgctcggtcaaaattggccatcatatctttacccgacaactctttcatccttcccgggtaaagaagggaagatgttgatacccgattttcctcaaattattttaaatttgcatatataccttccaaaatcactttctataataattggtatttttccatattttaattaatttcttttctaatttattcagtactttatattcaataattattcataaattacattataaataatttcaaaatatttcctagctcaatatataatttttaatccaattaggatttaattatttcacaaattagccaatttggcattatttcgctatagttacaataattttgcaattatagcctaattgtacattttataccatcttaattcaatagttagtcattttatattttaaatattagttaattaccttaatttcacctatttagcattaatttcatttttatgtaattattagctatttttattaattatttatctatttaattgggtattaaacaagtagccaatttctatttaaaatttagcctaatttaatttgaccccaacccaattgaaaccagcccaattacataacccaatacccaagcccaatctataaaacccacccgacccaacgtctgattaaatcctggccgttgattaattttgatcaacatcccaaaaacaccccttccttaattaacccctaacgactacgcccttcccctcatttactcccctttcattcatctctctactctctctctatctccggttctctctagaaccttctcgtctcctcctctccgatggacactgtccaccatttccggccacttccctcgccagaaaccatggactctcatcatctcctggcccctgcttcaccctatgccggtttgatgctaccctaaggttctcaggtggacttgaagcggttcaactcctcacatggtcccttttgccatttttcggccacctccggccgtttgagtaagatctatgacttttccggctaaagctggtgacatttttaaggttttcttgttttctctgggttctccgaaaccctaactctgtagattttccgattttctttcaaatctatgatagatctgtgtatactttaagctattttgtagttttctcaaaggttctccgatttttcgaaaatgactcttcgttttcaactagggtttcgtgaccccgttttgaatgaattttcctatgagttttatgcattttcctagggtctctactatgttttagtgatttacttaagcttctctcctttatctgagtcgttgtgatgaaaaccctaactttagacctaaaccctaaagttcctgatttgactatgtgtttgcgtttcaagaattctgtgactcactaatattttttaccctatgttattcgtctttgatttttcttgctttcctgtttatctcacttttcactctgtaactcatatgaacccttaatgtcatatgttttcactactagggtttctgacgtcttgcctaacatctgtgttaattcgtgttaattccctttaattgatgttatgcttgttcgaatccctgattctctgcaatttgttacttaattatttcctgacttgttcctttgcttataatgtggtcattccattcatacattggaatctatagtaactagtgttatttgaatccttgattcacggtgattcgaaagccttactgatttcctatgggatattcttactgatctccgacctttagtttattttctgttaattgattgttatttccttagttgatatcttctgaatctagtcttaattgtctacttgaattgggttgaaattgtttccttatatgttatatgcataagaaatttccttaattgttatttacctactagccgtttgagtttaaccccttcaatcaagggatacccaattgcctgctataattacaccgttttatattcctctaagctatatatggtcttttctttatttgttactcaccgtgtgaatcactcccttaattatgggtatacttgtactaattgggtactgattgatactcagtcccacaatcactggttagttcatgattcctaccttattgaccatagttttcaatactatatacacacaatcttcttgtctttcatacacacagacacgaacaactgatctgttcaactctctctctcacaactaaaacttgctactctctctcttctctcttctgtgctacttgctactatcctaagttagccggctgcaagccaaggctaactactgtgcctcttctatttctgctttattcacttcattggtatgtcctaattcgaatttcagttctcaaaccaatatgtttctattgttgttgcaatttgttgtgtgtctaatctgcttctatttactattctgttgttcaacatgtaactaaggtcctgaatcccctctacctgttaagttatgatttacttagcatgcttctgtatacttaacacctatttcttatgtgaactcccatgcctatggttgatacattagtttggtcatggtattagttgtttggtgttgatatgttaacctaatcctgtaccctactgtaccctgatcctctgaacccttatgagtttctgattgcatgcctatatgtgtttctacctactacatgcttacctttacctgccctgtatttgtccctcaatacccagacccctgattgtgattgttggactattcttggtcctgttgtatgatgctgcacttttttttttgagaatgatgttcttcccaactgttttcatcaattaaaccttttgttatgaaaactattttcactaagtctctcctcttttcaaaactgtttcaaaactgttctcttacttaatctcctcaaactatgtcgagcactctcactatattcttagaccctttaggttctgccccttctgtgggagaattgccttgggacccttgagttccctttgaactttgacacacaagagctggccttccacactgcacttactctatcttggttatgaaatctgggtgtgagcactgccagggatcccttgaggtccttagggaactctgacacacccggattgtgtaaaagctatgaaacatacttggtattgaggacatgaagaatctgggcatattttgtaggctccctatagttaacttcttatttttctatttcaattatgtaatttatattcaatggtctataataactatttgtaaacaactctggggacggatagtgaaaaatgggggtagtatgcatgccatagtttctaaaaggggtagaaatcatgatttaggatttactttctacctgcacaatagaaatcctgtgtagggatcatgtacacatgcatcagaaatcctgtcatcttaggaccatgtctactattttcttttcagcatatacatcatcctattatttagaaaatctgtgaaacatgctaataactagcacgctatcatgtacgcttaaaaaaatcctgtcctaggataaacgttaacacaaacctgctattcatgtaaaccaggtctaataatgtaacttcatgcacttagaaaatcccgcctaggagctttgcatataatctttctgcatctctatatgtacgtattagatatcatgctttaggaccttattctacgcctaaaataattactgacgcatgaaaaggcctaaaactgttttaccatgttctaacaaaccattaatcggtctctgaatattgataacacctagaactgtatgttatgaggtataacaacctgagattgttatcagctctgaataattgctacacacctaggcaagccttaggtaatccaccataaaaagataaaaccagaattgtttttgtgactaagtgtttaattgttagcatgttaaaatcagtaggcaagcctgattaggacttcctttttgagttatgtaataaatctgaatctgctattatcacttagacatcatgtttaggatccgaatctggaccttagttgtgtatgagacatgctgcttatgtgcactgtttggggaggtctttgagccttttttcctgtttatgtgctaccccttatctgcagtcctacttgttcattatatgtcgccctagaaactttacctttaaaacctgagggtctgcctagaaaccccccattttataggatatgagtcctaaattcctccgggactgataggaagggacgggtaacatcatgcaatagaggtcgtgaccaacatgcgcttagttaccttcacggggtgggagagggtagatatggacatgatgaccggtgggctaataccacgtgtagcccctctttgaggagtgtcataccgggtattgcattgatgtgatccatattataaaaaaatttaggacatccctttacttttcataaatatgcttagattgtaattcttttcaaaagctagttcttcattaactgtttttttacttagacttaaatcccgtatcatttgagccttacttgtttatttgctaaattgtacaaattcacaaaaagctgtttggtcgggaaccacagttgtggatcctgaggggtgcctaacaccttccccttaggataatttcaagcccttaccctgtctctggttatcaacgtagttataaatgaaccccttaggtgccctaacgcaccttaaaattgttaggtggcgactcttcaaaaatgcaaaacccctttcccaaaaggaacgagttgtctcaaccaatgtcataaacccggactctacgaggaaaaagggggcgcgacaatcctacacggggtatcacaaaaatattccgaacacattcctaagtcccaaatcacctaacgaagctatccgagcaataaaatccgcattccaaggttgtttaccaataagtcaactttcagttgacttttctaactataaggctacttttagagactaagtgtctcaattcttactacaaccattctgaacccgaactaaccaactctaacacatcatgaacaatataaccaagctatgaccaggaagaaatagtaataataatgcatgttctacgtaacgaccggccgggtcgttacattctccccctgttaaacaaacgttcgtcctcgaacgggtctagaaatatacttggagtctcaaacaagtgaggatatctgctttgcatctcccactcggtctcccaagtagcctcctccactggctgacctctccactgaaccttcactgaagctatatccttggacctcaactttctgacctcgcaagccaaaacagccaccgactcaacctcatatgacatatcatcctcgagctgaactgtgctgaagtccaaaacatgagacaggtcaccaacatactttcggagcatcgacacatggaataccggatgaaaacttgacaaactgggtggcaaggcaagtctatatgccacatctccaaccttctgaagcacctcaaaaggactaataaaccggggactcaactttcccctcttcccgaacctcattttacccttcataggtgacaccttcagaagtaccttatcaccctccatgaaagacatatctcggaccttacggtccgtgtaactcttctgcctagagtgcgccgtgcgaagtcactcctgaatcaacttcaccttctccaacgcatcctgaaccaaatctgagcctaatagcttagcctcaccgggctcaaaccaaccaaccggagatctacacctcctaccatataaagcctcatacggggctctgaatactggactgtagctgttattgtatgcaaacttcactagtggcagaaactggtcccatgaacccccgaaatcaatcacacaggcacgcaacatgtcctccaagatcttaatagtccgctctgtctgctcgtcggtttgaggatgaaatgcggtgctcaactctacctcagtactcatacccctctgcacagccctccaaaactgagtacctctgtcagaaatgataaaaacaggaactccatgcaatcggaaaatctccctaataggaatgaagtgcgcggacttggtcagtctatccacaatgaacaaaataacatcaaatcccctcgaagtccgtggaagcccaactagaaagtccatggtgatccgctcccacttccacacgggaatatctaacctctgaagcaatccacctggtctctggtgctcatacttgacctgctggcagttgagacactgtgctacatactcaacaatatctctcttcatccgcctccaccaatactgttgtcttagatcctgatacatcttcgcggcacctgggtggatggaataccgcgagctatggccctatgctaatatcaactcttgaagcccatccacattgggcacacaaatacggcctgcatccttataaccccgtcatcaccaatagtcacatccctggcatcacctcgacgaatcctgtcctgaagaactaacaagtgctgtcatcatattggcgtgctctaatctgatcataaagagaagacccggaagccatgctagctaacacccgaggaggctctgacaaatccaatctcactaactgccctgccaaggcctgaacatcacgagccaaaggtcgctctactgctgaaaggtaggctagactccccaaactctctgctctgcgactaatggcatcggccactacattggccttccccggatgatacaaaatagtgaggtcataatccttgagaatttccaaccatctcctctgacgcaaattcaagtccttatgcttcagcagatactcaaacttcgatggtcagtgaaaatctcacactgcactccatacaaataatggcgccaaatctttagggcatgaacaatggcagctaactcaaaatcgtgcacatgataattcttcccgtgcaccttcaactgtctagacgcgtaggcaatcaccctaccgtcctgcatcaaaaccgctgccaaactaactctagaagcatcacagtagactatgtaagaacccgaaccagtagacaacaccaataccggagctgtggtcaatgctgacttgagcttttgaaatctctcctcacactcatcggaccatctgaatgtagcacccttttgggtcaatctggtcaagggtgaagcaatagaagataacccctctacaaagcgacggtaatatcccgccaatccaagtaagctcctaatctctgtagccgaggacggtctgggccagctctgtgcctcaatcttcttcggatcaacctgaataccctcactagacaccacgtgccatgagaaagctgctgaaccaagccaaaactcacacttggagaactttgcataaagcttctcctcccttaaagtttgcaacacaacccttaaatgctgagcatgctcctcctggctacgagaatacaccaggatttcatcaatgaacacaatgacgaatgaatcaaggtaaggctgaaacacactgatcatcaaatgcatgaacgcggctggggcattggtcagcccaatgacataaccaaaaactcataatgaccatatctggtcctgaaagcagtcttcggaatgtcagaatcccgaatcttcaactgatgatatccggacctcaagtcaatcttggaaaacaccctagctccctgaagctggtcaaacaagtcatcaatacggggcagaggataccagttcttcaccgtaaccttgttcatctgcctataatcaatacacatgcgcataaaaccatccttcttcttcacgaacaacactggtgcaccccaaggtgacacactaggccgaatgaaccccttatctaggagttcctaaagctcatctttcaattctttcaactctgttggggccatgcggtaaggtgggatagagataggctgggtgtttggcaccaagtcaataccaaaatcaatgtccctgtcaggtggcatgcctggcaggtctgcagggaatacgtccggaaactcacggaccacaggaacagaatcaatagaaggagtctcactactaacatccgtcacaaaatccagataagactcacaccccttcccaatcatatgccgagccttcaggtaggaaattatcctactaggcacatactccaccgaacctctccactcgatcctcagcaatccaggcatagataaggtcacggtcttggtgtgacggtcaagaacaacatggcatggaaagagccaatccatgcccaaaatcacatcgaagtcaaccatgctaagcaataatagatctgcccaggtctccagacccccaatagatataacacaagaccggtacacgcggtccaccataatagtatcacccaccggagtcgacacatgaatatatgtaatcaaggacccatggtgtatatccaagaaatgagcaaagtatgatgaaacatatgaatacgtggaaccaggatcaaataataccaaagcatctcggtgatagactgagataatacctgtgatcactgcatctgaagctatggcatctggtctggccgggagtgcatagaaatgggatttccctccacctgatcgacctccccctctatggcggcctctgactgactggcctccacccctagttgcctgagcgggtggtgtagaaactggtgctgaagctggaggctgactcctctactaaaatgaactaccagaaaggcggggacaatacctcttgatatgacccggatccctacactcgaagcaacccctctcagcaaaagacggtggggatgttgaatgatgaacgacccagatgagagctacggggaccgtgtcccgatgaagcaccactatagactggacgagctggccgaggaggcctaaatggacggcctctgctatgctgagactgacctcctgagtgaacaccaccatagctaccagatcctcgaggcctcttggcctccctctcaacacgctcctggcggcgcacggaatcaatctccctggctatgtcaactacctcctcaaaagaagcggcaaataccctttccctggtcagaaaaatccgaagctggtaagtgagaccatcaacaaacctcctgatcctctctctgtctgtgggaactagccagatggtgatgagtggtgattttaccacctattttagccttttctcattagattttgtattgttaaatgataacttgaggtcgtttttagtgtataattgctctatttgtaggaaaatgatgccatgaagtggttaaggttaaattggagtgaaattgagcaaaagagtaaagaagagaaaagaggggagcaatggacgaatgcgatcgcatatgcaacatgcggatcgcatttcgagcccagagatcgcataccgcaacagaaagatgagtcaagtttaatgagtgaaatgcggtcgaatatgcgatcgcatatctcaaatgcggttcgcatttgagtcgcatcaccatctgatgcctgaagctacattgtaaatgcgacgcacgaatgcgatcgcatatcactaatgcggaccgcatatctcaaatgcgatgaacctctggaacctagggttttgatgtgcgacggaaagagtgaagatgcgaatcgcattcctgttatgcgacaggaatgcgatcgcatatcggcccgccaggggtgtttttgtccacttttccctcgaattttttgcccactataaaaagcataccttggaaacatatgaaaaaagggagatcgatttttggaaatttttcttcagttttgtaaatatattttgagtagagaagatcaagttttgaagctagggctttgcacacacacttgggtcttgaagatttcaccattgtggttaaggatttcttacccatttatgtttatttcttcatttccttgttttgtattgaatatctaagtgtgtagtatttttccaacacttgaatacggtttttgggaatattcatatttaaagtgtggattaaataccttgttgtgcttatgtattgaatgattttcatatatttatgaagtgggtctttgttattttaattattcttgttctttaatgtttccaaagggattagctaaccctaggactcgcccattaactccgaattagttttggaaaagattatttggggttgggaagattaattaacaagaacttgaggctttaaccctcattttatagattctacctagggataggattgaactacttgtagccaaactcggaagtgcttaatctcctaattgggttagggataattcaattaggaagtcttgttagtctttgggaaaagctaattaagaaatgttatccgtggctaattaacattaccctctcatatttgtaaaatcgtgaaatacattggatcgttactcgagtgtaatacccgaagcatcgatacttgttgccctcgatcattttaattgctttctaggatagtttatagtttcgcatttagttataaacaattatcaaaaacccaaaatcgtatttgtttggcactgcacgataggtgataattctctagcattcctaaacgccctcatattgttctctgtgggattcgaccccaaccttgttgggttactatatttgacaacgatcgcttacattcttttaaggtgtaaattgagcgtatcaaattttggcgccgttgccggggaccaataggcgtaacttaggttattggttgttggagaagtaagcttgagtgctttgatccaaacttgtgaatatttgtgtaattattttttcttgtttattttcttaatttttcattaatatatatatatatatatatatatatatatatatatatatatatatatatatatatatatatatatatatatatatatatatatatatatatatatatatatatatatatatatatatatatatatatatatatatatatatatatatatatatatggcatcacggtcgtgtctccctgatgcaactgctcgaactctctgcgcagctcctctctgcgggactacgatatgtacttctccaaaaagagaatggataactggtgccatgtaaggggcgctacatcagcgggtctacgcctctcataggcctcccaccaagcaagtgcagctcctgaaaattggaaggtagtaaatgggactccagtagcctctaatatccctgctgtgcgtagtatcctctaacacttgtccaagaaggcctgtgcatcctcgccctctttaccactaaaagtcgagtgatggattctgttgaatctttccaacctgcgctgctcatcatcagctaaaggtgggaccacataatcctgtaccggagcaatcggctgcattggggttgccccaggtgtctgaagtccctgggtgaccttctcaggtgtcggggcagttggagtatgaatgcctccaccggcctgagaagtggctgcagtagtggacatagcgacgacctgtgccaagctggtgcacaccgtcaagatctggtctagggtctcctgaagacccggaatcacaataggcattgctggtgcctgaccctaccccgttggaatctcagctgcggggacctgatcctgagcaatgggagggtccacaggtgctgccccggctgctggtcatgctggtgtctgatcaccactaacggtagcacgagtactcaccatctgtgacataatgaaaacaacagaagtttagtttcagaattcaacagagtcgcacgacagaattcaacaatgtggaattttcctaagggttctgtagcctttcgaagataagtacagacgtctccgtaccgatccgcaagactctactaaacctgctcatgactggtgagacctattcaacctagagctctgataccaacttgtcacgacccaatttcggagtcgtgatggcgcctgtcgtggaaccaggccagccacctatttataactaacctagatttgattaccagagaaaacatcattttaacaagtatgaagatattaacagtagtaaatctgaaatttgaaacaatctatgaaaccaaaacttaaatcctccaaatctcggatccagtgtcacacagtcatgagctgctaatacataacataattaaaagaggaatgaccaacatagtctgaaaattaaataacgacaggtagaataggaaagagatgacgagatcacgatcgccagctgctacctcgacaactctgatgaaactgtcagctactcaatgaccagatccgagtcccgatgtacctagatcttcacacaaggtgcaaggtataacatgagtacaccaactcagaagtaacgaacccaaactacgggctgagaggtagtgacggactaaacctccggtaatttgaataacagtgtataaacttgagcatgacaataatgtaactgataaaataatgaaacgtatcaattatgtctgtacaacctacatgccactagatgatcatcagtaagcagaaatagaatgtacgtagtattccagtttctcacaaggaagtccactcagtactataattggccttcaggcccagggaaaatccatcccggattatagatgaacacaagtgacacaatcacctaatactgcggaaaaagctagtccaaccccacggagaagatccatctccagaacatatcattcggacaagatccatgtccagggacgatccatccctaaatatatcaataacttcggacaagatccatgtccagggaagatccatccctcaatatctgtgcgctcactggggtgtaaagactccggaggagctcctataagcccaaactctatatcaagccaacgaaggcatgattcaaggatcgatgcggtgtgcagtctgatctcataagtgtatcaataccaggctctaagcctcactcagtcaataccttccagtctcgctcacaaggctctcagatataagaatcaacccaaataatgacaacacaaaaataaactaacatttactgagactgaggcatgaaacatatactataataggactgagtacatgaaagcaaatagtcacagatagagacaacaacaatttaccattccggtctgaacacattgggcgtgaatccttagtatttatacttatcatgatttctaatatgttcaaagtaattacatccttcacagtacaagtatcagcctgaaatgaccggtaggcggtgccatgggatgagcttggccacaaatattcggtgtatgcccgcattcccgtcacttggcaagtgcgtcaccttaattaacatcaaataccagaaaatttggggtttcgaaccctcagttccaagtttggaaacgttacttacctcaaaaccggctaaaatactactccgcagtgcccttgcctctaaattcggcctctgagtgctccgaatctaccaataatcaaattcataccattataatatgccacggaattaaacccaatcgaaaattatcaaaaatactcaaaaatcccgaaattggtcaaacccgacccccgggcccacgtctcgaaatttgataaaatttacaaaactagaatccttatccttccccgagtctacccatatcaaatttaccaaaatccgacctcaaatacctttcaaatcatcaagagaatttcccaattttcttcccatttccccccaattttcactttgattcctcaatttacatggtaaaaatcaatactaattcatgaaattagactaaaagtgattgaagaacacttaccacaagaaccccactaaaaatctctccaaaaacctccttctcccgatctctctaatggtgttttgaaatatggcttaaaaccctcatttttagaacttaaactttctgcccaagcttttcgcacctgcggcccttgccctcgcacatgcggtccgcacctacgctcaggaggcccgcacctgcgaaatttcattaaactgccaactctcgcacctacggcccaggcatcgcacctgcggctccgcagatgcgcctaaacgaccgctcctgcggttttcctccaggacccctgttcccgcacatgtgattaccatggcctctcctgcggctcgcacctgtggtcaaacatccgcaggtgcggaaatgacagcaattgaaacaccaacaactgaagctgcatatttccaagctcaaaattcccgttcaccatccgaaatcaatcccgagcccctcgggaccccaaccaaatataccaatacatcataaatgatcattcaaacttagtttcactttggaaacacctaaaataacaccaaaacaccaaaatcgcatcgaattcaagcctatgaactttgaaatttctaaattctaccaacgatgccgaaactatccaaaacacctccgattgacctggaatttgcagacatacccaaaatgacattgcgaacctgtttcaaatgtcggaattctattatgaccccgatagcctattttccattgccgaccgaaaatcgccaaaaattaactttcgccaattcaagcctaatcctacactgggtattactaaaatatttcgaacacgctcttaagtccaaaatcacctaacgaagctatccgagccataaaatctgcattccgaggtcgtttaccaataagtcaactatcagttgacttttctaactataagactacttttagagactaaatgtctcaattcttactacaaccattccgaacccaaactaaccaactctaacacatcatgaatagtataaccaagctatgaccaggtagaaacaataataataatgcatgttctacgtaacgaccggccgggtcgttacccttttgtgccgggatgttgttcacagagagaagtgaaggtatgcatgctttctttatggatttatcacccgccaaagcactttgaagctatgtgttcagcaatatgagttagccataagatctaagttcgagaaagaattggaagctgaatataggtcaaggtgctttgaaccaaaatgtttgtctgaattcgcatgggaggaaaaacttcaaaaatgttatactcgtgaagtgtttgaattttttcagttacaattaaggaaattgttccattgtgaaataagcaaccctaaagatcatcaaacaacccttggagtggagaaatacattataacatattattcgctaaggagctttaacactagagatccatttgtattcacggttgaatatactcctattggagaatatctaagttgcagttgcaagtgggttgaaacaagaggtattcaatgatgtcatatactaaaggtgttgtctcataagaggattaaaaacgttgacgagaagtatatattgaaaaggtggagaaaagatgttgttcgtccgcacttgaaacgtttctttctagaaggttacccacgtatgaattctgaatacatgatgtacagggaactattaaagcattttgaacgggtttgcgatattgcattggacactgaagtgatgaggagatatattaagtatgatttgaacagattggaacatgaccttatgaattgggatgatgatatgatagttccaaattgggatttggaagatacacatgatggtgagggtgagggtgaaggaagaaatataatagatcctagatatgtaccttctcgtggacgtccaaggttgaatagatatagagggtgaatcgattcatactttagaagttcacaaacggatggtggaagtggagttagagacaataggaggggtagaggtggtggtataggtgttggtagaggtggtagtagaagtggtggtagaggtcgtggtaaaggccgtgccagaggaggtggtagaagttatcagctaacggaaggaattgaggtaaagtttaacaaatttgatttattattttattttattttatttttaggtaaataaattgcttaatagtcttatttactctaattacagcaagatgatgcaacagtacaaccacaaagtagcttgcctgatctaaacgatgaaataaattgggaagtagaagacttgactgtttagtttgagatgatttaagtttgaaacttgtttaatttgatttgagatagatttttttgatttattgactttgttttttaaaacgcgtggtatttctttttgttcataaatgtgaattatattatcgatcacttcacctggtgatcccaggaaagcctcagcaaaacaaaacaaaaacactttgattcatctatacattcaatatctagcagtaactacatagactatctattcaacattcaacatatttgtgttagttgcattttttttatagatgaaaaccgtgcactcctcttttaataccaaaccaacccatttaacttcccaatatagcatttacttttacaaattaataacatttcaacccatttaacttcccaatgcatcatttactctatcatttcggattttttaaatgataaaaacaaaaagaaattatggtaaagaagaccaatatgcagattgaaatttcataacaaaatatttcaaatgttataaaagataataaaaatcaacatacatgaaaataaaagataataaaaatcaacatacatgaaaataaaagataataaaaaatcaacacaacaaacacatcctgtaacgacccgacatgtcgttttgagctctagtgcgttgttcagcagtttgaggtcatgagaagctcgtttcaggtattatgacttgtaggtttggtcggaactgaacttcgggaagtttagagttaattggaatgaaaattctcatttcggaagccttaagttggagaaattgactaagattgggattttgatcaaacgacctcggaatcgagatttgaaagttccagcaggttcgtatgatgatttcagacttgggtgtatgttcgggtcgggttttggataacccgggagcatttcggcatatattatggaagatagcattttagaagaattttcataaatttgggttggaaggcatttcagtgttatagatgtctgtttgggattttgagcatggtaatagcttcgtatggtggttctgaagttgggagcatgatcggaagtgaattcggatgtccgtaggttattttgaagtcacttggctaaagatagaaatttgaaggtttttgagaaatccgaccggaagtggaaattttgatatcggggtcggaatgcgatatcggaagttggatcaggttcgcaatttcgaatatgacttgtgtgaaaaatttgggatcaatcggacgtgatttgataggtttcggcatcggatgtggaagtttgaaatttctaagttcataaagattgaattggggagcgattcattgtttcaatgttatttgatgtgatttgaggccttgagaaagtccgtgttatatttttggacaggttggtgtgattgtacggggtccggggggcctcggaaggattccgggtggttaacggatcaaaatttgaagttggagaagtgttgaggttgttgtcatctggtgtgaccgcacctacgagggtttggccgcaggtgcggctttggcaacacaggtgcgaagtttggctggtttggcaggaagccgcaggtgcgggctcttgggcgcacctgcgggagcgcaggtgcgaggtatggaccgcaggtgcggaaatgaggcctgggcagattgttttaaaacgggattttggccatttcttcatcctttcacttggtgtgggcgatttttggagagcttcaagaggggaattttgtcatctatgtcaaggtaagttgtttatactcgttccaagttaaataccaagtttatgcatggatttgaacatgaaaaattgtggaaaattgggaattttgaagaaaacttagaaatttggtaatttggatttttaccacgaattcgagcatggaaatttgagtaaattgtatatttgagatggtaaggctatgggtagggtttatcttcgagaaatttaggaatccgggcacgtgggcctgagggcattttggtcaattctttgggcggagatgagaatttgtataatttgaattgttaaaaggtattagagtatattttcattggtttgcctctatttggatagttttgggcgttgtgcatcagttggagtcgtcggaagggcttgggagccggttatgaagtttcggagcgaggtaagtctcatttctaactttgtgagggggaattttccccctaggtgaactaattaaatatatgatactatttgtgggggatacgtacacgcgaggtgacgggagtccgtgcgtagctactattatgcttatgtccgggtagcctaggacccactagcatgctttacttgctgtacttgcaactttgttggtaaaacgagactgtctaatctcattgaattagtaaatgaatacttaggtacgttaaacttcattttcttaatcgtgtaaacagagaatttatcctttcttcggctaaatattccctgacaaattcctgaggtattacttgaatgtgagtatttatatgggtacccgagtcgcaagtatgattcgcgagcggggtaaccctattatttatatgtaaccgtgtcgcatgtatgtttcgcgagtggggtaaatcctcctaccacactcttatgggatcgggttgttcgcctcggcaggacttatgtaccacactctcatgggagcgggccgttcgcctcggcaggttaatagatgcatctattgttcgtgtcgttcgacccttcagcagtgcacattttacttttatgttggatcgggtcgtacgcctcggcatttcctgggtacttactatctttcctttaatcgtgcgtaatgtttgtctagaagccagtgtacctgagggttctcccccttaattaaagtataacaacctatttgggtgaaaccgtatctatgtatatgttttatttacggaaggaaattgctaaatgagatttgagtaaatcataaggagggaatcataccatgtgatttattctcgtttgttatatacctttactctgtttcatatttatttttcgttactgtacctgatatttattgacctctagctagtgtcaaagttgacctctcgtcattacctctctgaggttaggagggatacttactgagtacacgttgttttcgtactcatgctacacttgatgtgcatttttattgcacaggtactttcacagcaatatggttgacttggagacttagacgagctaaagcaaccggaggcgacccgcagccggcagagtcttcctctatgtattgtattttcattttattccttgtccaatttgtatttcagacaagctttgtagtatttgtaaaattcttagaaattgctcatgtacttgtgtcaccaagttctgggaggtgtttgggatttaatttaattagttgaatgatttatctgtcgtatttatttaacgaagatttattcattcgttatgcagtgcaatgaaaggtaacaaattcaaaaattgttaaagcatgaattaaactcaactattaaattattggcttgcctgacagtggtatctgacgccatcacgaccttatggattttgggtcgtgacacatactagtaccaagtaaaatatggattagtacaaacaggatatctgtctcccttcacgtcaacatcgaagatagaagcctgtggtgaaacatcaaccaacgtaaatttgacgacgaaacctccccttaaaaaattctccaacaaaaaagtctccagccttcacggaaccttcttcgaaaaccaacggtcgtcatatttacatatcactctttgccacgatgtcgaagagacgcgcgttctaattctagaggaatatgcttgtacaacttttttggaatatactgtaaaaaaaagtatatatattaagtttcgtaaatatgaagtttaaaggacataataatttaactcaataagttattgtaacattcaaagaaataaagtttagtggacataataatttaccagatacgggtcgtagatgcactcattagacataaccgcttcaaatgttgggggatactcttcttctttatcactgctagtataagagtaagaatgagcatcactcctagtagaagagttagataggtctcgttgggtagaggaagaggcatccatagtttaggttttgagaatgtgagtgtgttttatgtcttttagtgtttgagtatgtgactgtgttttaggtctttatggtttgaatatgtgaccatatatataggggaaaagccagtccaaaaaaaatatttcaaacaccctcatgtcagtgaaaaaataacctattttttgccacaaatatatggttttgtttgaattatcgaataaatggtgggagttgaattaatggtgttagttgaattttatttattatttcgaatttccatgtaaatattaaatactatttaataccaacactattcacatatcaacccttttttgaatgaaacactattcacattccaaccattttttgaatgaaccactattcacattccaaccatatagttagggtttgtagttatgatagtagaataatatattgaatgaagactattgacattgcaaccatatagttaggatttgtagttagggtagtagaataatgtattgcatgaagactatattccaaccatatactgaaacgatacaaaaaaaaattacaattataacaaaacagaaatttgatttcattaataattataacaaaacgtacacattacataactggatgaaaattaaataaaatacaacaaaagtaaaaaaacaacacaaacatggatttcccacaaacataacctacaaactagttaatttcaaccggatcgtcgggagttccttgtcctttcacttgcactttgaagacaacaaacaattctgcaatttcaaccaactcaaatttaacaaaacaatcccgcttgatatcattattcatcacaaaaatatttcaagccgtctttgagccatcttcgttcaccaatgttaattcccataaaaaactctctgccaccatattgaagaacaacgatgctatgtgattcaggaatgtgcttgtgtagtcgttttggaatatgctgcaaacaaaaagaaaaaaaaaacttgtttgagattttaatacaaccaaatcagtttctgcttcttttccaaagctattttcgaaaaacaaaaacatcttttgtatttttgaatcgaaaagcaattgtatttgaaaacaaaattaaaaaaataaatatcatttaccatataatctttctagatgtatgaatctttcatactcacttcaaatgtcatgaaccaaaatccataaggtcgtgatggcgccgaaaatcactgttaggcaagccaatcattaattagttgagataaattcatgttttaacatttttaaaatcgttacctttcactttaacacataataactagataaaattcattaagtaaaaacaacagtctatttttcattttaataaaatacatcccaaatacatcccagaacccggtgtcacaagtacgtgagcaatttctaagaattttataatttctacaaagcttgtccgaaataccagtggacaagaaatttaaaatgaaatacaagtacatatgaggaagactctgccggctgcgggtcgcctccggatgatgcagctcgcttaagtctccgatgccggccacattgctatgaaggtatctgtgcaatagaagtgcacaacaagcgtagcatgagtacataaataaatatgttcccaacgaatatcccgtctaatcttgaagaagtagtgacgagaggtcgacttgacactcactaaggtccaacaaaataatctaacaggatatgatatcagtttaaagtcttgatttccccaaaataatcaaataatctaacaggatatgatttccccccaaatatcttgtcacttcaaagtcatgaaatctttaacagtttaacatgcgcatacgggataaggataaccggcctgagccatcataataatcatagttgtgcactaccgagggtcgaacgacccgaaccataatttcatatatcaatctcgccgtggcatacggcccgctcccatgagagtggggaaataacactctgctcgcgaaatgtaaattgcgaagcggtcacatgcacacacaatattcttcataaactactttccaatgaacaactcttttaaattatcaacttccatgatctcaggaaacaaggctacatataacatgaattcatgaagcatataattcatttcgaggaaaagcacaagatatgatgtgggcctaactacccggacatagcaataatagccgctacatacggactctcgtcacttggtacatacgtatccccccacaaacatttttacacatagcatttaaatcacctatggggacaattctctcttacaaggttagaaaggagactcacctcgtgtcgaacctactccccgggtcaagaatgtgcccgaaactctgaactagtctcccaaggacttgaaactaatcaaatgttacgtaaatatatcaaattatactcaaaagcatggaattctcctatttatttggtcatttcatcctacttgaagaaatcccaaaattcaacccccgggcccacatgctcggattccgaaaattctcgaagataaactctacccatagctctaccagttcaaatatacaatttactcaaatattcatgctcaattcgtggtaaaaatccaaattaccaaatttctaggtcttcccttaaaatcccaatttttacacaaattctcatgtctaattccatgtataaaccttgtataacttaaaacgtgaagaaataaattaccttgtgatccttgacgaaaatccctccttgaagctctccacaatcgcccataccaaatgaaaataggaggagaattggcaataatcccgttaacattatgcccaagcctcatttccgcacctgcggtctaaccttcgcacctgcgctcccgcaggttcgcccaaactcccgcacctgcggcctcctcaactccagcccaaaactcgcacctgcggccaaagcctcgcaggtgcggtcacatcaaatgacaacaacttcatctttcttaaacttcaaatattgatccgttaactacccggaatccacccgaggccccgggaccccgtccaatttcaccaacctgttccaaaacataatgcgtacttgctcgaggcccccaatcacataaataacattgaaacaatgaatcgctctccaatccaatctttatgaacttagaaatctccaacttctacattcgatgccgaaacccgtcaattcacctccggttgaccctaaaatttgcacacaagtcatattcggcattacaaacttgctccaactttcagaatcgcattccgaccccgatatcaaaatttccacttccgaccggattcttcaaaaaccttcaaatttctatctttagccaaatgacttcaaaatgacctacagacattcaaattcacttctgatcgcgctcccaactccagaatcatcatacgaagctattcccaggctcggaatccaaaacatacatcaaattcactgaaatgccttccaacccaaatgtatgaaattcttctaaaatgctaacttccacattatacgccgaaatgctccctggttatccaaaacccgatccggacatacgcccaagtccgaaatcatcatatgaacctgctggaaccttcagatcctgattctgaggtcgtttactcagaattccaatcttagttgattcttccaacttaaggcttccgaaatgagaattttcctttcaatttaactccgatcttcccgaatttcaactccgaccatacacacaagtcataatgcctgaaatgaagttgttcatggcctcaaacctctgaacgacgcgctagagctcaaagcgatcgatcgggtcattacattctcccccactttaaacagacgttcgtcctcgaacgtgccaagaactactccggagttaactgaaatcattgtttaacacctcgtgaaccttcccatgctaccacaacccattcgagcatattagctcgatcaaacctgaagatatcctcttttatccatacaataagctcagaacccagttccaacacctgaaatttctctgccagacctatttccaatatataatcaccgtatcaactaccacacgaggcaccagaacacaactgcgtacctttgccgaatttagcaccatacaccgcacatctcatcatccaaccacaatgacatcccccgaaccttaatagccaaaatttctcaactctgatgctcccaatgcaccttatgatatatatatatatatgtatatatatatatatatatatatatatatatatgtatatgtatatatatatgtatatgtatatacatccttctataatgctaacgataccaccacaacagaggagatgtgtagaaatttctaaccagtggtagcgttaaccaaacattgaatctttccccttgactaaaatcatcatctcattacaaacaaataagggtaactgtcctttaatgtatatcacttaatattattgcactgatccctgatccaatagtctagtctcacccagtatgagctactcggccaaccaatcaccccagacataaccaacagtctcacacgatgccccaatgcgccaataagccacaattcgaacatgatacataaggaaatgactcaggaagggattactcgactcatgctacaaatatgaactttcctcagaaaataggaagtaaaacacaagaaaaataaatataggaaccttactcaacatcacattgttgcggcgtgcaaccctgatccaaataacatacccgtggcggcgtgccacccgatcccatcataaaatttacataaggaaatatacacggatctgaattgctcactattacaaattactgaatacctgtcacaagcacgctaagtgcataataccattctggggagactgatagagccatatgctataaactcaagcaaaattgaggtgcgatatataatctgaatctcaagagccatcctgctcacataacctcatcactacgcggaatctcaacacctaagaaattatcaagccgtttcacaactcacacgacacgatcataataacacatgaatttaacgaagatggaacaacatctgatattccaacacccctccttgaggagcgctataccgaatgaacacatctgactcgcatgaagcccataatcttgcttaaattcgttcacacacttcaagccgattctgctcgcactgaactaggctgatagccttgcctgggtccaaaataacccacttcctctcataacacacaagaacaaccatcatcgtcgggacgaacaccccacaatccacaaccaactgaaccgaacgccttccaggcataaattctcaaataagcaatattgcacttccttatacttggtctaaatcttcaatccatcaggtgactacctatcacacttataccatcttcccgtggtcacgctcccacgaccttcaacgaggtaacaagtctgcacatccataccaccgaccacactaatcctgcaaaacacatcaagaacccatgaccagggcacaaagcctctttcactaaatatcgatctcagatgacactgaagataacaccagcttactctgaactttcaaatcgctttttcttgcccatccgagctcatgacatccttgttaacaccgaaccgcaatatcgattttcactcccggttacatactgcttactgcacctatcaggccaatatggaataacataggaattccatcataactcatgaaccactaataggggaacacttcatcatatagaaaccttttgcttatctcaattaaatagaacaatgacaatactcaagtgaactctcacaatcacccaacatgtaaatccttatgtagtagtttgtaccaccatagtccttctggaatctgcctacaccagataggctataatacttgactgcttccaaataaaacctattacggcggtcgacaagcctcgcacccacccgcccaaaccacctgcataatttaatcacactgacgaattgaccactgccgtacatgtgccatttcgaccatggctaaccaatctatcttctattttattatccttaattgcctcataaataatattaaccccattcaacttgttgacccaagtcactgcatggttttgaatattgacaaatgtctaccaagttgaaccaggtccatcaggctatcatagtgaaacagactcattggcacgcgaagagtccatgcgtaggagataacatgttatgtgaattatctgggaactaagaggttgtctcctaaagcgaaaaggttgcaaattgataagaggttagagtttaaattcagcaaggatagtaacaaaggaaggaagttgagtttattacaaactcttccaccaaggaagagttgcatcagaattaaacaagaacatctcaactactggatctatataatgttgaagtatttcttctgaagagacatcgcacaaaggcataagtgaaacaagaattgaaagcaaaattcctagagatattttgcaagcagaatccttgtgcgacacaaaggctactgaccagctagaagaaccagtttcatctgtttgtttattgagtctagttggttgtagtaggtgatttaatattgtatcttttcagctttcttagaagcaattgtaataggtacacactacttaagttagagttaacttgaaacttgtcgcaattagctagaggctaagttgcaacaaagggattagagttagtcctaggtttacaaaagagtttattttgtaaatgttgtttggctcagagttgtagtgaagagtttgtgaaagtactgctgaggagtaggtcgtggttttttttcaccttttgagtcaggtgtttttcacgtaaaaatctctgtgtttttactttactgtatttattatttcgcaccagtagaagttggaacaccaagaagaaccaggttcttctaccaaggcaacactcgaaaaattagacaccacaaaaatcacccccgctcttgtgtggtattgaagtataaaacatcacaactcataacaaactcaatcctcgctcatcccgagcggccctcactcatgcgaacacgctgtttcaatcccacaaaccgtctcgtaccctcctgataatctttctacaacccgaagtttacttctcacactcccccaatactatcctgcacgctgaaaaatatcatagaacactctaaccattttccctctcagaaattatactgcaaaagatcgattcttaatcatactgctgtctttaacccttaaacaccgcgttcttaaccttcgaatttactaggaccactgctgagagtcacccactctgactggccccgaacacaatcaaccccaaggctcttctagcacatgaacatcctctcactgaagtacgtgactgagtcactatccttacatttcgcctatgccttaagcataaattctgaatctttcaaatcctaaccccgggtccaacagggacaacttttgcacaccttcatcaaatctcacgcacaatcaccattttactcctttcccttagctgtaacaactttcccatacgccgacaatctgcaacaccatgagaacacaatcctacaacccaactgcaggtggtgggactcccctacttagcccgaatctactccttgcaccactctagaccctactaagatcctttctcctttgttaacatgatcttgctcaaccaatccgtccaatttttccgcctgttatcattccctaaatactcaaattatctaacattattcacacattctgccttctaccgaatagccactaggattcctcacagaaacttgccaaccacagaaccgctaacctactcacaggagataactcacctgtggaaatcaccaactgacaccgtccaacaacactgcgctgcacaccctctacaacttcaatatcccatcctaagcctgttctcattcaccaactttaccagttcgtccgcttctcattgatatctactaaatgcgctacaccatcttcaaattcaccgccatattgcatccttattcatccctaaccactcctctctatcgtatccaaccttccgccgaataaccaacatttcagtttaagctcgtggacctaacaaccgtccactaaaattctcaagtcactccaacttctcctcaagatatgcagttgtcttaccactgaactcatatgctacactgtcactctcccacttagttaaactcattcctttaggcaactacccgacttctatctcttatgcctagcattctttttgagatttagccgccacctgacatttctcacatgttttcctccatcacatgcttctcaattgcggcctcaatgccatatcattcttttcaacacctaaaccagcagaccaccataacttcgacttcccgaagatcatctttctcgagctaccttcattagaaacactcattcaatactttaaccactgcataccacggtctatgacagccgcttctccaataccacttcacaacactgtaacccaatgcaactgaagaaccataacaccggcgaatttaacacatcctattcgatcaaggacgacgatatcacatcacaggcgaatactccacctcgcttgataacaccaagtctcattactttatcaacccaaatctgaccattcataatccaaatgcctttcctctgccggaactaaaatactgaaatctcgaaatcatactctgagaagaccccccttcaagtcatccattaccccgacatatgggcaagcatcctaccatcacactcgcatcgcgcgttaaccaattgtaaatatcatcactacctgagcatagcctcaagtctcttagaaacatatctaccgagctgaaacaacatattatccttctgcatggctacaacaacagccccaaccaattacgcatggaaaacattgcgcaccctattcgtagcaccatttcaattcctcaaatccacgtttcatagcaagcgcttcgcgatgtgtaagattgagtaggaagaaacataggcacaagccttaagggaatcaaatcgcacgatgaggaatcaagaagggaagtgctcctaacaaccatgtagcctctcgaagataggtacagacgtctccataccgatccgcaagactctactagacttgccatgacttgtgaattctaagggaaccagcgctctgataccatgttgtcacgacccaaaattcataaggtcgtgatggcgtcggacaccactgtcaggcaagccaatcattaattagttgagataaattcctgttttaacatttttgaaatcgttacctttcactttaacacataatatccattaagtaaaaacaacagtctattttccattttaacaaaatacatcccagaacccggtatcacaagtatgagcaatttctaagaattttacaatttctacaaagcttgtccgaaataccaatggacaaggaatttaaaatgaaatacaagtacatatgaggaagactctgccgtctgcgggtcgcctccagatgatgcagctcgcctaagtctccgatgccgaccacattgctatgaaggtatctgtgcaatagaagtgcacaacaagcgtaacatgagtacataaataaatatttacccagtgagtatcccgtataatatcgaagaagtagtgacgagaggtcgacttgacactcactaaggtccaacaaaataatttaacaggatatgatatcagcagtaggcatacgaggaatataaaagaaaaacagtaaacattaaagataactgtaattcaaataaatactggaagtaaatgcaaatttactacttcattttcccccaaatatcttttcacttcatagtcataaaatctttaacagtttaacatgtgcatacgggatagggacaaccgacctgagacatcataataatcatatttgtgcactgccgaggttcgaacggacagaaccataatttcatctttcaatcttgccgtggtgtacggcccactcccatgagagtggggaaataactctctgctcgcggaatgtaaattgcaaagcggtcacatgcacacacaatattcttcataaactactttccaatgaacaactcttttaaattatcaacttccatgatctcagggaaacaagactacatataacatgaattcatgaagcatataattcatttcgaggaaaatcacaaggcatgatgtgggcctaactacccgcacatagcaataatagccgctacgtacagactctcgtcacttgatgcgtacatagcccccacaaacatttacacatagcatttaaatcacctatggggacaattccctcttacaagattagaaagaagactcaccacgtgtcgaacctacttcccgggtcaagaatgtgcccgaaactccgaactcgtctcccaaggactcgaaactaatcaaatgttacgtaaatatatcaaattatactcaaaagcatggaattctcctatttatttggtcatttcatcctacttgaagaaatcccaaaattcacaccccggacccacattctcggattccaaaaattcttgaagataaactctacccatagctctactagttcaaatatacaatttactcaaatattcatgctcaattcgtggtaaaaatccaaattaccaaatttctaggtcttcccttaaaatcccaatttttatacaaattctcatgtctaattccatgtataaaccttgtatttaacttaaaacgtgaagaaataacataccttgtgatccttgacgaaaatccctccttgaagctctccacaatctcccataccaaatgaaaataggaggagaattggcaacaatcccgttttaaaacattttgcgcaagcctcatttccgcacatgcggtccaaccttcgcacctgcgctcctgcacgtgcgcccaaactcccgcatctgtgtcctcctcagctccagcccaaaactcgcacctgcgacgcccaaagctgcacctgcggccaaagcctcgcagttgcagtcacaccagatgacaacaacttctgctttcttaaacttcaaatattgatccgtttaccacccggaatccacccgaggcccccaggaccccgtccaatttcaccaacctattccaaaatataatgcgtactttctagaggcctcaaatcacatcaaataacattgaaacaacgaatccctctccaatccaatctttatgaacttagaaatctccaacttctacattcgatgccgaaacccgtcaaatcacctctaattgaccccaaattttgcacacaagtcatattcaacattacgaatctgctccaacatttggaattgcattccggacccgatatcaaaatttccacttccagtcggattctttaaaaaccgtcaaatttctatctttagccaaatgacttcaaaatgacctaaggacatacgaattcacttctgatcacgctcccaactccagaatcaccatacgaagttattcccaggctcggagttccaaacggacatcaataacactgaaatgccttccaacccaaatttatgaaatttttctaaaatgctaacttccacatatatgccgaaacgctcccgggttatccaaaacccgatccggatatacgcccaagtccgaaatcatcatacgaacctgctggaaccttcaaatcctgattccaaggtcgtttactcagaattccaatcttagttgattcttcccacttaaggcttccgaaatgagaattttcctttcaatttaactccgaacttcccgaatttcaactccgaccatacgcacaagtcataatacctgaaatgaagttgttcatggcctcaaactactgaacgacgcgctagagctcaaaacgaccggtcaggtcgttacatcaaatattggatttatatctccgtcgttatcatcagaagagtagtcggatggggatcgtttgacaacgctaggagagggtccatggtttgtttctagggtttgtgtaagagtgagggtattaaaatgttttgtgtgtgtgtgaatgtgtataaacctatattacacaaacacggccaacctaacttttttttgtgtgtgtgagggtattaaaagttttttgtgtgtgtgaatgtgaccataaactataataaaaggaaattttggaacctaattaatatctatattttgcatatgtagtccacatttgaccatatatataatattgatgacaaacaagttgtgatattaattttgacaccaatagttatatttgggatataattagcaatttagttatgaaatattgttgcgatttatatatatttacattgaatgtctatatatatgtatatagtagctaactatataattccattcattaaggtcatatgtatgaccttatttatataatagaaaatatatatttttggttgatcttaattataatctacttgtattattcattacttattaaattttcatgtgaatttttattaaattacccgtttaatataatttaaaaactaaaaaatttattactcttgaaatttaattttgctttatcttagtaaaaagggactgtacgttttttccctttaatatgcaaaaggaaattagttagttttataactaccttgacgaggggatcaaaatggacaaagtgggagtagttggtggtttctaacacttgttttatgtttttggttcacgttcaatgaaaagaactgcccataaataccaataaaatttccttcgtatcctttattaacaatcacaacccctagagaaaaaaaactaatacctaccctgttgaatatgttgtgacagttattttgtcagtttatggcaattttaaaacctccactacaactgccacaattaggaggagtttttaatctgtaagagtttttaacaatactttagttgctgaattttggttttatatttggaagttaagtaaaatgttttaatttagttttgtttaaaatttgatcatattaactctttgagagtaaatagtaccaaccaaattggataaagtgagtagttgataaaccctaaaaccaagggcatgttaagcattataaattacgaagataatgagggtattttcaagtgataaaatttgttaaacattccataagtacctttgctcgccttcaattagacacttcaaaatatataacatatatcaaattccattaaaaaaaataatatccacaaaatattataaaccctaacccatacaaatattacaaacccatatcaaattatttgtctcttctttttggtgccaaaaaatgagagggaaacattaagttgtctagtaacagacaaacaacaaaatttgcaactgtgaaaatgatgaatgattcacatgatcacaacacgaaacataagaaaattaacacacgacatgtaatagaatagtcattacgcacactgaaattctaaatacaatttcagcttcatgtgacagaatagtcattacgcatgtaacagaaaattaacacacaacatataccagtactagttaatttgaactttgaatacaacttctgcttcaggtgatgcacactgaaattctgactgctcaattagtgatttgatactttcataatattcataggttaatgcctcaattttgattcttcgaagagtcagagacttcgccaaaagaagcttgaccagttgcatgtgaggatttgtccctcgaatattcctaatcacaattaatctgatgtggttgaatattgtatctccaaatcttccttccaaattaatgttatccagagccaaaagtaccccactattatccacctaagtataaaaaacaccaaattttaatgaggatcgaaggtataaagaagccactaagtaacgagaattaaataaaagacttatgatgattaagtaagaaccttgattttcagatattgtaaatatggaaagcttctcatcaagcacaaagcacaagcgatgaaatataattcactatgataaagatcatcgaggtattcacacaattaagatgaaagggaagactagttggtacttttcctgcacctgcagccaataactagaaaaaccatcccaaattaaaggatggctcataacacaaaataggttccatatatgaaaatgcattacggtgaagttatgaagcacatttatcttgacactacggttatccaaatggagatgttccagcgcacaaaaagactcaaagaacctagtaatgtgatgtcttgattccaggatatagtctcccctaagagcaagcgataattgtgccagaagaggaatagttttcaaataaataaagcttactctgcctttgaagtcaagggacttcagttttgggggcattagtttcaatgacaccgatgtaattatctgagatttcaagcaccaattgctcgatgtcacgatccaaatttcggagtcgtgatggcgcctatcgtggaaccaggccagccacctaactataatagttctaggttcggttattggagaaaatgctcatttttagtaaatccaaatcaataatagtggaaattcataatttgaaaacaatttaaggaaggaaaactaaattcaaatactacagcctcggattcggtgtcacgcagtcatgagctactaatacataaacaagacccaaaagaaatgactaacatagtctgaaagtaaatacgacaagtagaagagaaagagatgacgagatcccggtctccagctgctacctcgtcaactccgatgaactgctgcgactcactgaccagagctggatctcgatgtacctagatctgcacacaaagtgaagggtataacgtgagtacaccaactcaataagtaacgaaaacaacctataggctgagaggtagtgacggactaaacctctgataatttgaacaacaacatatagtttgaacatgacagtaatatagtagaaagtaagcgaaatgcaccgatttatgtctgtaaacttgcatatgtttgtgtaaaatcaggaatgctatgtatacagtatccactcttataaggaagtccactcagtactcgaattggccatcaggcccagggaaaatccatcccagaatatggataaatacagtgacatagtcactcggtactgaggaaaaagaaaggccaatccagccccacgaagaagatccatctccggaacaagacaccacggagaagatcctgtgatgacccaaaaggtcatcctaagtaattctagctaaatttgtgtttcgagaccccgaaagcctccgttaatctcacctcgatatacgtgcgcagcccgggcatgtagtcgggaagcttctatgtgaaaatttgataaaaatggaactttgaattgaataattgaataaagttgactttggtcaacatttttggtaaacggacccgtacccgtgatgtgacggtcccggagggtccgtagaaaaatatgggacttgggcgtatgcccggaagcgaattccgaggtcccaaacccgagaaatgaatttttaaagaaaattattttctgaaaataataaaggattttgaaagtgaataattatgtgaaaaccgtgttaccgggcctgtattatggtttcggagcccggaacaggtttattatgtgttatgtgacttatttgttaaatttggtataaaacagacttgaaatgacgtgattcggatttaaaatgggaaatttaaaagtttatgaaatttgagaaaattctatagatttcggagtttaattcattgttttgatgatattttgatgggttaaaagcttgaacaagtttgtatgatgttttgggagtcgtgtgtgttattggttttgagccccgagggctcgggtgagcttcaggtaggtgtcagagtgcaaaaagggttgaaaaatatggtgttttgactgattttctgatatctggtgtctactcaatgcgatcgcatacatagacccgcgatcgcacagctttgtgttagggggagagtcagttcttctatgcgatcgcatagcaaggggcgcgattttataggaatataggtgtccgggtggggctggtccaatatgcactacgatcgcactatcatgcccgcgatcgcagagcttgtcagtccctcctctatgcgatcacattcctatctccgcgatcgcatatgctaattttgcccagttattttattaagtctaaaatagacccattacaggattttgccattcttcacccttttcttcttccccaaacctccataaccgagaatcaagctccccaacctccataactccatagttaagttctcttaacctcgttttctcttaatttcttcaactaatcactagattctaggcctaaaacatggaaattaaggtagaaattgggtttttgggaaaaaaattggatgattcaacctcaatttgggggcggatcctaaaactaattagataattgaactcagggggttatgggtgatcgggttttggtccgaacctcgagtttagaccacgtgggcccggggtcaaattttggtaattttggaagaatgctagaaattgaatatctaggctaggggattatattattgagtctttattgatattattgaattaattatgcatagataacgttgtttcggagtcggattataaaggaaaggcggtcttagagggttgattgacatactttagaccaaggtaagtgtcttgcctaactttggtgagggaatatgtattaattgctatgtgctaagtgattatcatgttcattgcataggtaaggtgacgagtacctatgcaatgtgtgtcaagcatgtccgtgagtctaattgatagaaattgcagtatttcttccatgtttagcatattatgagattgtctttactttataatttagtcgtgattgaaagtattggctattgagttttagaagtattgatacgaaagataatacaagtgtagagtatgtgattgaggtgattggttatagctgagacccttgctgggcatttcttgagctattaattgatgttacccccttgccgggtgttctgaactgcttatttccactatgatgtactccttgccatttatcagttattgtttggtgaggaagagtgtaaaacacgaagggtgatgccgtgccattatacttgattacattgcataatgaggaagagtgtaaagcacgaagggtgatgtcgtgccatgattcatatttattataagcacgaaggttaatgtcgtgccatgatacatcgtatatttcattgtgaggaagagagtaaaagcacgaagggtgatgtcgtgccatgatatttgattacattgcattgtgaggaagagagtaaaagcacgaagggtgatgccgtgccattgtttacttttctgatatttatacttgcttcgtgggctactgtactagatgcctcccttgttcacttctatctgtcgatttgactacttcatttcatttgttcccccttactgtcccgcatcccttatttgtttgcttatctcttgcctcgtattatccatgtacctgttgtagaataggacaggttatcgctattgtcaagtctagcctcgtcactacttcggccgaggttaggctcggcacttactcagtacatggggtcgattgtactgatgctacactacacttcttaatgttgtgcagatcacgcatccggacccagtggaccgcattgagggagtcaccttcagtccacccatagcttcaaggtatacccgctggcgttcgtgggccttggtgtctcgcttgcttttggattcctcattgtcttactttttctcctagtttcaagataattgtatatttcttttcagactttgtatttagttctcagtttagatagttcgtgaggttgtgacaccccgattttgggattgttcgttggatttgtcttatcatttcattatgcgtttttgaggtaatattattatttttctgctgtgaaatgtttgaagtgatttgggatgttcagtaaaaatcgagagttaatggtgtgggatgtttttcgaaaaaggttggacattaatgaattcgagttatttcagtaaatgtttgaaggttaatagttttaaatactgttacgttgtgttattaagacaataatgctgtatatgttggcttgtttagcaggttcaacgttagacgcagtcacgtcctgaaaggtgggatttcgggtcgtgacaagttggtatcagagctctaggttgcttaggtctcacaactcacggacaaccttggtagagtctgagggatcggtacagagacgtctgtatttatccctcagaggctgctaagttaggatactcctcttcttttcatactctatcgtgcgttgtatattttggtatactgatcgagtttttattctattttctcgcagatggcgaggacgcatgcttcccttggttccgctcagcagcccgacactcctgctacatctcctacgtcgaggtcgaggacgaggccgtgctagaggccgaggccagggcagggctcagcccagagtagcagccccagtagaggaccctcaggtcgagtctgacgaggaggtcccagttccgacagtcccagttggaccagcacaggtcccagaggggttcatagctaccccagtgcttcaagacgctcttgtccgtctggtaggacttatggagagtgtggctcaggccggtcttcttcctacagctccagccggatctcaagctgggggaggtatccagactcctattattcatacaccagagaaggttgccactcagtttcagactccggcacctcagccagccggagtagcacagccaggtattgcagcacctgtagctgagggagcagctatgtcagcagatgcgttgtggagattggacagattcaccaagttattcactgctacttttactagtgcaccgttagaggacccacaggattatttggacagttgtcatgaggttcttctgaacatgggtatagtggagtccaatggagttgactttgctacttttcgactatctggcgcagacaagacttggtggagggactactacttagccagatcagttgggtttgcatctttggcttgggctcagttcacagaggtatttttggggaagttccttcccattactcagcgagaggatcttaggaggcagtttgagcgccttcagtagggatctatgtctgttactcagtacgagaccaggttcatcgctctagccaggcatgcattgatgatactccccactgatcgggagagagttcggaggttcattgagggattggcccagcctatacgactccagatggccagggagtcgagtactgatatttcattccaggatgcggccgatatagcaaggaggattgagatgattttgtcacagggaggtggtcagggggctgacaagaggccctgtcattttggtagatttagtggagcctcgtctggaggcagggattctttcagtaggggtcatccaccctggccatttcagtcagcacttcaggtatcttcccgtgcaccgtcagttcatgttagcacaccgccagcacctattagtgcacaaccgcttcagagttaccagggtagttatcagggtcgtcagggccagtttccgagtcatcagccacagcagcagagatcttgttatagttgtggtagcccggggcacattaccagatattgcccccgagcttcgagtggacccgagtatcaagactcccgtgccgtggttctcgcagcaggtgtacccttaccccctcatccagctagaggtggtggtcgaggtgctagaggtggtggtcaggttcatagaggtggagaacaggccgcgaggggtagaggccaggttgcagcaggtagacccaaggatgttcagattgaggggctcagcaccggtgttatgcttttcatgctcgtcttgatgctgaggcttctgatgtagttattacagttacggtttcagtttgcagccgagaggcttcagtgttatttgatccgggttctacattctcctatgtgtcttcatattttgccccttatttgagtatgcctcgtgattctctgagtactgctgtacatgtgtctacaccgttgggtgatgctatagtggtagatcgagtctaccgtgcttgcgcaatagttattggcggtctggaaactcaggttgatcttttgcttcttgatatggttgattttgatgttatattggggatggactggttatctccctatcatgctatcttggactgtcatgccaagacagtgaccttggccttgccaggagtacctcgtttagagtggagggggactcattgtcatttttctagtagagttgtttcttatataaaggctcggtgcatggtcgagaagggttgcttggcctatttggcctatgttcgtgattctagtgctgaggttccttctatcgagtttgtgcctgtggttcgcgagtttccagaggtattccctgctgacctgccgggtatgccagccgacagggatattgacttttgtattgagttggctgagggcactcagcccatttctattcccccgtatcgtatggctccgccagagttgaaagaattaaaggaacaattgcaagattttttggataaaggcttcattaggcctagtgtttctccttagggttctctagtgttgttcgtgaagaagaaagatggctcaatgaggatgtgcattgactaccgacagttgaataaggttactatcaagaacaagtatcctttgccgaggattgatgacttatttgatcaacttcagggtgatacagtattctctaagatagacttgagacctggttatcatcagttgaggatcagagcatctgatgtgcccaagacagcttttcgcactcgttatgggcattatgagttattggtcatgtcgtttgggttgaataatgcccccgctgcttttatggagttgatgaatcgggtattcaggccttatttgcactcgttcatcattgttttcattgatgatattttgatatactctcacagccgagaggagcatgagcatcaccttagagtcgtcctccagaatctgagggataggcagttgtatgccaagttttctaagtgtgagttctggttgagttttgtggcattcttgggcgacgtcgtatcggcagagggcatctaggtggatccagagaaagtttcggcacttagagattggcctaggcccacttcagccacagagattcagagtttcttgggcctagcaggctattatcgccggtttatggaggggttttcatctatagcagccctatgactaagttgacgcagaagagtgctcagttcagatggtcggaggagtgtgaggcgagctttcagaagctcaagacagcattgaccacatcaccagtgttggtactgcgcacaagttcaggttcttataccgtgtattgtgatgcttcgcgggtaggactttgtgcggtattgatgcaggagggcagggttatagcctacgcatatcgctagttgaaaattcatgagaaaaactatccagtccatgatctggaacttgcatctattgttcatgccttgaagatttggaggcactatttgtatggggtgtcgtgcgaggtgttcactgatcataagagtttgcaatacttgtttaagcaaaaggagttgaatatgaggcagaggaggtggttagagttgctgaaggattatgatattactattctctatcatccgggaaaggccaatgtggtggccgatgctttgagccgtaagtcggtcagtatgggtagcttggcctatttatcagtgggagagcgacctttggctttgtatgttcaggtgttagccaaccgatttgttagattggaggtttctgagagtggcagtgtgttgtcccataccgttgctcgttcttcattgtatgattgtattcgcgccaggcagtatgatgatcgtcacttgtgtgctcttagagatgcggtttggtacggacgtgccaagcaagtcacagttgatgctgaggaagttttgagattgcagggtcgtatatgtgttcctaatgtggatgacattcatgagttgatgttgcaggaggcccatagttcccggtattccattcatccgggcgccgcgaagatataccaatacttgcggcagaattattggtggcgtaaaatgaagaaggatattgtaacttatgtagctcggtgcttgaattgtcagcaggttaaatatgagcaccagagacccggaggtttaatgcagcaaatccagcttccctgtcacgacccaaattcccaccctttgggccgtgactgcgcctaacgttgaacccgctaggccagccaacgtataacttgcaatagtaatttataatcatttaatactgaatgaaacgatggttcgtcacttttaacaaatttccaacaaaatcctgtacacattttcttaataaagataaggaaaaccttaagcatgcgaagaataaagacatgataaacttaaacaacgtaaccggtgtgtcacaatctcacggactaactactggaatactaaatacaagtctggaaatgaaaatactacactgtcttggaaataataaggaagacaatgaaatgataaaggagagaagcctcgggatccacgaacgccagtgtatacctcgagctctggtgtggattgaaggtaactccctcagaacgctccacggggtccgatagcagggtctgcacaacacaaggaagtgcagtgtagtatcagtacaaccgaccccatgtactgagtaagtgccaagcctaacctcggccgaagtagtgacgaggctagacttgacttaaacgataacctgtcctattctacaacaggtaataggaaatagcatgaagcatgggataaaccagcaagtaggggatacaggagcagaaagaggggaacaaggggaatgaaacaactacatcgacagatagaagtaatccagtgaaacaagccaatataattgacaacgaaataaataaatatcggaaacataaacaatggcacggcatcacccttcgtgcttttactctcttcctcacaatgcaattcaatcaaatataatggcacggcatttaccttcgtgcgtataataaataaaatcatggcacggtatttaccttcgtgcttataatcaataaaatcatggcacggcatcacccttcgtgcttttgcactcttcctcactatgcaatgaaatcaagtattatggcacggcatcacccttcgtgctttacactcttcctcaccaaacaataacaaataaatggcaaggagtaccgcataatggaaacaaacaattccacaacacccggcaagggggaaaatatcaagtaataattcaaggaatgcccggcaagggtctcagctataaccaatcactttaatcacgttctctacacttgtattaccattcgtatcaacactttctcaaactcaatgaacaatactttcaacaaataataagtcaccgagtatagacaatttcataatatactaagcatggaagaaatactgcggtttatatcaaaatagactcacgggcatgcttgacacacattgcataggtactcgtcacctcacctatgcaatgaacatgatattcacttagcacatagcaattaatacctattccctcaccaaagttaggcaagacacttacctcgggtccaaaatatagcaatcaaccctctaagaccgcttttccttttgaattcaactccggaaccacaatatctaagcataattaatttgagtgtatcaataatgactcaataaatcaaacccgtagtctaattatctatttctaattattcttcctaaaattccaaaatttaaccccgggcccacgtggttgaaactcgaggttcggaccaaaaaccgatcacccatatccccacgattaagaatatacaatttgttttaagattcgaccccaaattggggttgaatcacccaaaaattccaaaaacctaatactacccaaaaaccccactttcctaattgatttcatgagtttaggcctagttttctaatgattaatgatgttaattgaacgaaaacaaggttacgaaacttacccgagtagcaagggaggaaaaatgagctcaaggctcgctaatggaggttggggatgaaggaagggttgaacttttaataatacccgcaagtgttctgtttttggacttaaaaattagaattaactgggcgatttccgcacctgcggaaaattagtcgcaccagcgatcccgcaggtgcggaaaagaggtcgcacctgtgatcatgggccagcccaggaggggcctctcctgcggacaaagctccgcccctgcgaggccgctcctgcggggatttggtcgcccctgcggggaaatcccgcgcatgcgaggcttggaccgcgcctgcggtctcgcgcctgcggaatgagttccgcacctgcggactctgggaaaaagggctggggtcgctcctgcgaggctgggaccgcaggggcggtcccgcacctgcggctgggcaaccgcacctgcggtcacaccagctgctgtgcacctgcagtggtgaattgctggtttttggcctcgtgcggggtctgggaggcacctgggcccacccgatcccccgtccaaatataccaacaagtcctaaatcactaggcggactcactcgaactttcagaacacgaaaaacaacagcggaactcgcatcaagccccaagacttatttaatcaacacttaggaacttaaaattcaagaattcatttcaaatatgccgaaccggcctaaactgctcggaatggcatcaaactttacagataagttataattgacaccacggaactattcccaatctcggaatctcactcggacctcgagaacatcacatcactttccaagccacatttccatttctttaaaacttccaaaacctcatctttgatccgaaaccactcaattcacgcccgttttacaccaaattttacaaataagacaattaatatataataaacctgttccgggctccggaaccataatacggacccggtaacactgttttcacataattattcactttcttattcctttattattttcagaaaataatttcttttaaaaattcatttctcgggcttgggacctcgaaattcgattccgagcatatgcccgagtcccatattttcctacggaccctccgggaccgtcgaatcacgggtccggatccgtttgccagaaatgttgaccaaagtcaactatatccattcattaattatcaaaaactcatttttcatcaacttttcacataatagcttcccggatacacgccagggttgcgcacgcataacgaggtgagactaacggagactctcagagcctcggaacacagataaggcttaaaatataagatgaacttttgggtcatcacaatctccacctctaaaacaaacgttcgtcctcgaacggacatcgagaaatacctgagtctgagaatatatggggataacgactcctcatatcggactcggactcccatgtagctgcctcggcaggctgacccctccactgaacacggaccgaaggaatactcttcgacctcaactgtcgaacctgcctatctagaatggctactagctcctcctcataagtcagatccttgtccaattggacaccgctgaaatcaagaacatgaggcggatctgcaatataccttcggagcatagatacatgaaaaactggatgcaccgctgataaatgcggcggcaaggcaagtctgtaggccacctctcctaccttgtccaaaatctcaaatggaccaatatacctatggctcaacttgcccttctttccaaatctcatcacgcccttcataggcgacactcgtaggaacacctgatctcctaccatgaaagccaaatctcgaactttacggtctgcatagctcttttgcctggactgagctgtacgaagcctatcctgaataatcttcactttctccaaagcatcctggactaactcagaacccaataacctagcctctccgggctcgaaccatccgactggagaccgacatcgcctaccatacaacgcctcatacggagccatctgaatgctcgactggtagtttttgttgtaggcaaactctgctaacggtaagaactgatcccatgaaccaccgaagtcaataacacatgcccgcaacatatcctctaaaatctgaatagtgcgctcggactgtccgtccgtctgaggatgaaatgcggtactcaactcaatctgtgtgcccaactctcgctggaacaccctccagaaatgggaggtaaactgggtacctctgtctgatataatagataagggcacaccgtgcaatctgacgatctctctcatataaatctgagctaacttctccactgaagatgaaactgccaccggaatgaaatgtgctgacttggtcagcctatccaccacaacccatactgcatcaaccatcctctgggtccgtggaagtccaactacaaaatccatcgtgatacgctcccacttccactcgggaagctgaatctgctgcatcaaaccacctggtctctggtgctcatatttaacctgctgacaattaaagcaccgagctacatatgccacaatatccttcttcattctacgccaccaataatgttgtcgcaagtcctggtacatcttcgcggcgcccggatgaatggaatacctggaactgtgggcctcctgcaatattaactcacgaaggccatcaacatcgggtacacatatacgtccctgcaatctcaaaactccctcagcatcaattgtgacctgcctggcacgtctgtgccgaaccgcatctctaagggcacataagtgacgatcatcatactgcctggcgcgaatgcgatcatataaagaagaacaagcgacggtatgggccaaaacactgccaccctcagaaacctccaacctgacaaatcgattggctaatgcctgaacatccaaagccaaaggtcgctctcccactgatagataagccaaactacccatgctgactgacttccggctcaaagcatcggccaccacgttggccttccccggatgataaagtatggtaatatcataatctttcagcaactctaaccaccttctctgcctcatattcaactccttttgcttaaacaactattgcaaactcttatgatcagtgaacacctcacacggcaccccatataaatagtgcctccaaatcttcaaggcatgaacaatagctgcaagttccagatcatggactggatagttcttctcatgaatcttcaactggcgagatgtgtaggctataaccttgccctcctgcatcaataccgcaccaagtcctacccgcgaagcatcacaataaacggtataagaccctgactctgtgggtagcaccaacactggtgctgtggtcaatgctgtcttgagcttctgaaagctcacctcacactcctcagaccatctgaactgagcactcttctgcgtcaacttggtcataggagccgctatagatgaaaatccctccacaaaccggcgataatagcctgctaggcccaagaaactctgaatctctgtggctgaagtgggcctaggccaatctctaactgctgaaactttcttcggatccacctgaataccttctgccgacacaacatggcccagaaatgccactgaactcaaccagaactcacacttagaaaatttggcatacaactgactatccttcagagtctggaggacgactcgaaggtgttgctcgtgctcctctcggctgcgagagtatatcaaaatatcatcagtgaaaacaatgacgaacgagtacaaataaggcctgaatacccgattcatcaactccatgaaagcagcgggggcattagtcaacccaaacgacatgaccaaaaactcatagtgcccacaacgagtgcgaaaagccgtcttgggcacatcagaagccctaatcctcaactgatgataaccagacctcaagtctatttttgagaacaccgtagcaccctgaagctgatcaaataagtcatcaatcctcggcaaaggatacttgttcttgactgtaaccttattcaattgccggtaatcaatacacatcctcattgagccgtatttcttctttacgaacaacactagagcaccccaaggagaaacactaggcctaacgaagcctttatccaacaaatcctgcaattgttcctttaactccttcaactctggcggagccatacgatacgggggaatagaaatgggctgagtgccctcaactagctcaatacagaaatcaatgtccctgtcgggtggcatacccggcaggtcagcagggaatacctctggaaactcgcgaatcacgagcagtgactcaatagaaggaacctcggcactagaatcacgaacataggccaagtaggccaagaaacccttctcgaccatgcgccgagccttgatataggaaacaactctaccagaggaatgactaggagtccccctccactctacacgaggcactcctggcaaggctaaggtcaccgtcttggcatgacagtccagaatagcatgatagggagataaccagtccatccccaatataacatcaaattcaaccatatcaagaagcaaaagatcaacctgagtctccagaccaccaataactattgagcaggcacggtagactcgatctaccactgtagaatcacccaccggtgtagacacatgtacagcagtacttagagaatcacaacgcatactcaaataaagggcaaaatatgaagatacataggagaaagtagaacccggatcaaataacgccgaagcctctcggctgcaaactgaaaccgtacctgtaataactccatcagaagcctcagcatcaggacgagcaggaaacgcataacattagggctgagcccctcctatctaaacatccctcggtctacctgcggtaacctggcctctacccctcgcggcctgtgctccacctctatgaacctgaccaccgcccctggcacctcgaccaccacctctagctgaatgagggggtacgggttcacttgctgcgggaaccacggcacgggatccctgatagtggggtccactcgaagcttggaggcaatatctggcaatgtgccccggactaccacaactataacaagatctctgctgctgtggctgatgactcggaaactggccctggcgaccctgataaccaccctggtaactctgaagcggctgtgcactaataggtgctggcgatgtgctaacatgaactggcggtgcacgcggagatacctgaagtgctgactggaatggccggggtggatgacccctactgaaagaatccctgcctccatacgaggctccactaaatctaccaaaatgacggggtctcttgtcagccctctgacctcctccctgtgacaaaatcatctcaatcctcctggctatatcggccgcatcctggaatgaaatatcagtactcgactccctagccatctggagtcgtataggctgggccagtccctcaatgaacctccgaactctctcccgatcagtggggagtataatcaacgcatgtctggctagagcgatgaacctggtctcatactgggtaacagacatagatccctactggagacgctcaaactgtctcctaagatcctctcgctgagtaatgggaaggaacttccccaaaaatacctctgtgaactgagcccaagtcaactgtacagacccagctggtctggctaggcaatagtctctccaccaagtcttggctacaccagacagccgaaaagtagcaaaatcaaccccgttggactctacgatgcccatgttccggagaacctcatagcaactgtccaagtagtcctgtgggtcttcagaagaagcgccagtgaatgtagctgtgaagagcttggtgaacctgtctaacctccataaagcatctacggacatagctgctccctcagctgctggggatggaataactggcgggaccaatacggctggctgaggtgccggcgtctggaactgctgagctacctgctctggagtgcgagtggcaggagtctgagtacctcccccagcctgagatccggctggagctgtaggaagaagaccggcctgagccatactctccataagtcctaccagacggacaagagcgtcctgaagcactggggtagctatgaacccctctgggacctgtgctggtccaactgggactgccggaactgggacctcctcgtcggactcgatctgagggtcctccactggggctgctgctctaggctgagccctgccccggcctctagtacggcctcgtcctcgacctcgacccctcgtaagagccgtagcaggagtgtcgggctgctgagcggaaccaagggaagcacgcgtcctcgccatctgcgagagaataaaatagaaactcgattagtataccaaaatatactacgcacaacagagtatgaaaagaagaggagtaccctaacttagcagcctctgggggataaatacagacgtctccgtaccgatccctcagactctaccaaggttgtccatgagttgtgagacctaagcaacctagagctctgataccaacttgtcacgacccaaattcccaccctttgggccgtgactgcgcctaacgttgaacccgctaggcagccaacgtataacttgcaatagtaatttataatcatttaatactgaacgaaacgatggttcgtcacttttaacaaatttccaacaaaatcctctaaacattttcttaataaagataaggaaaacgttaagcatgcaaagaataaagacatgataaacttaaacaacgtaacacttcccacagtggtaactctcaaactttactgggcctttcaaatcccttcaattgtttcacagcagagaaataataacaatatcttagaaaaactcaaaacgaaatgataggatatctaccacgaacaatcccaaaaccggggtgtcacaatctcacggactaactactggaatactcaatacaagtctggaaatgaaaatactacactgtcttggaaataataaggaagacaatgaaacgataaaggagagaagcctcgggatccacgaacgccagtgtatacctcgagctctggtgtggactgaaggtaactccctcagaacgctccacggggtccgatagcagggtctgcacaacacaaggaagtgcagtgtagtatcagtacaattgaccccatgtactgagtaagtgccaagcctaacctcggccgaagtagtgacgaggctagacttgacttaaacgataacctgtcctattctacaataggtaataggaaatagcatgaagcatgggataaactagcaagtaggggatacaggagcagaaagaggggaacaaggggaatgaaacaactacatcgacagatagaagtaatccagtgaaacaagccaatataattgacaacgaaataaataaatatcggaaacataaacaatggcacggcatcacccttcgtgcttttactctcttcctcacaatgcaattcaatcaaatataatggcacggcatttaccttcgtgcgtataataaataaaatcatggcacggtatttaccttcgtgcttataatcaataaaatcatggcacggcatcacccttcgtgcttttgcactcttcctcactatgcaatgaaatcaaatattatggcacggcatcacccttcgtgctttacactcttcctcaccaaacaataacaaataaatggcaaggagtaccgcatagtggaaacaaacaattccacaacacccggcaagggggaaaatatcaagtaataattcaaggaatgcccggcaagggtctcagctataaccaatcactttaatcacgttctctacacttgtattaccattcgtatcaaccctttatcaaactcaatgaacaatactttcaaccaataataagtcaccgagtatagacaatttcataatatactaagcatggaagaaatactgcggtttatatcaaaatagactcacgggcatgcttgacacacattgcataggtactcgtcacctcacctaggcaatgaacatgatattcacttagcacatagcaattaatacctattccctcaccaaagttaggcaagacacttacctcgggtccaaaatatagcaatcaaccctctaagaccgcttttccttttgaattcaactccggatccacaatatctaagcataattaatttgagtgtatcaataatgactcaataaatcaaacccgtagtctaattatctatttctaatcattcttcctaaaatttcaaaatttaaccccaggcccacgtggtcgaaactcgaggttcggaccaaaacccgatcacccatatccccacgattaagaatatacaatttgttttaagattcgaccccaaattgggttgaatcacccaaaaattccaaaaacctaatactacccaaaaaccccactttcctaattgatttcatgagtttaggcctagttttctaatgattaatgatgttaattgaacgaaaacaaggttacgaaacttacccgagtagcaagggaggaaaaatgagctcaaggctcgctaatggaggttggggatgaaggaagggttgaacttttaataatacccgcaagtgttctgtttttggacttaaaaattagaattaactgggcgatttccgcacctgcggaaaattagtcgcaccagcggtcccgcaggtgcgaaaaagaggtcgcacctgcgatcatgggccagcccaggaggggcctctcctgcggacaaagctccgcccctgcgaggccgctcctgcggggatttggtcgcccctgcggggaaataccgcgcctgcgaggcttggactgcgcctgcggtctcgcgcctgcggaatgagtttcgcacctgcggactctgggcaaaagggctggggtctcttctgtgaggctgggaccgcaggggcggtcccgcacctgcgactgggcaaccgcacctgcggtcacaccagctgttgtgcaccagcagtggtgaattgctggtttttggcctcgtgcggggtccaggaggcacctgggcccacccgagcccccgtccaaatataccaacaagtcctaaatcactaggcggactcactcaaactttcagaacacgaaaaacaacagcggaactcgcatcaagccccaagacttatttaatcaacacttaggaacttaaaattcaagaattcatttcaaatacgccgaaccggcctaaactgctcggaatggcatcaaactttacagataagttataattgacaccacggaactattcccggtctcggaatctcactcggacctcgggaacatcacatcactttccaagccacatttccatttctttaaaacttccaaaacctcatctttgatccgaaaccactcaattcacgcccgttttacaccaaattttacaaataagacaattaatatatagtaaaactgttctgggctgcgaaaccataatacgggcccggtaacactattttcacataattattcactttcttattcctttattattttcagaaaacaatttcttttaagaattcatttctcgggcttgggacctcggaatttgatttcgagcatatgcccgagtcccatattttccaacggaccctccgggaccgtcgaatcacgggtccggatccgtttgccagaaatgttgaccaaagtcaactatattcattcattaattatcaaaaacttatttttcatcaacttttcacataatagcttcccggatacacgcccgggctgtgcacgcataacgaggtgagactaacggagactctcagagcctcggaacacagataaggcttaaattacataagatgaccttttgggtcatcacattcccgtgtggaagtgggagcgtatcacgatggattttgtagttggacttccacagacccagaggatggtttatgcagtatgggttgtggtggataggctgaccaagtcagcgcatttcattccggtggcagtttcatcttcagcggagaagttagctcagatctatatgagagagattgtcagattgcacggtgtgcccttatctatcatatcggactgaggtactcaatttacctcccatttctggagggtattctagtgagagttgggcacacagatcgagttgagcacaatatttcatcctcagacagacagacagtacgagcgcattattcagattttggaggatatgttgcgagcttgtgttattgattttggtgaatcatgggatcggttcttgcctttagcagagttttcctacaacaacaattaccagtcgagcattcagatggctccgtatgaggtgttgtatggtaggcaatgtcggtctccagtcggatggtttgagcccggagaggctagattattgggttccgagttagtccaggatgccttggataaagtgaaaattattcaggataggcttcgtacagctcagtccaggcagaagagttatgcagatcgtagagttcgagatttggctttcatggtaggagaccaggtgttccttcgagtgtcgcccatgaatggcgtgatgagattcggaaagaagggcaagttgagccctaggtatattggtccatttgagattttggacaaggtaggagaggtggcctacagacttgccttgccaccacatttatcaacagtgcatccagtgtttcacgtatctatgctccggaggtatattgcagatccatctcatgttcttgacttcagcggtgtccatttggacaaggatctgacttatgaggaggagccagtagccatattagataggcaagttcgccagttgaggtcgaagagttatccttcggtctgtattcagtggagaggtcagcctgccgaggcagctacttgggagtctgagtccgatatgaggagtagttacccccatcttttctcaggctcaggtacatttctatgttcgtttgaggacgaacgtttattttagaggtggagattgtgatgacccaaaaggtcatcctaagtaattctagctaaatctgtatttcgaggcaccgaaagcctccgttaactctttgagagtaaatagtaccaaccaaattggataaagtgagtagttgataaaccctaaaaccaagggcatgttaagcattataaattacgaagataatgagggtattttcaagtgataaaatttgttaaacattccataagtacctttgctcgccttcaattagacacttcaaaatatataacatatatcaaattccattaaaaaaaataatatccacaaaatattataaaccctaacccatacaaatattacaaacccatatcaaattatttgtctcttctttttggtgccaaaaaatgagagggaaacattaagttgtctagtaacagacaaacaacaaaatttgcatttgtgaaaatgatgaatgattcacatgatcacaacacgaaacataagaaaattaacacacgacatgtaatagaatagtcattacgcacactgaaattctaaatacaatttcagcttcatgtgacagaatagtcattacgcatgtaacagaaaattaacacacagcatataccagtactagttaatttgaactttgaatacaatttctgcttcaggtgatgcacactgaaattctgactgctcaattagtgatttgatactttcataatattcataggttaatgcctcaattttgattcttcgaagagtcagagacttcgccaaaagaagcttgaccagttgcatgtgaggatttgtccctcgaatattcctaatcacaattaatctgatgtggttgaatattgtatctccaaatcttccttccaaattaatgttatccagagccaaaagtaccccactattatccacctaagtataaaaaacaccaaattttaatgaggatcgaaggtataaagaagccactaagtaacgagaattaaataaaagacttatgatgattaagtaagaaccttgattttcagatattgtaaatatggaaagcttctcatcaagcacaaagcacaagcgatgaaatataattcactatgtaaaagatcatcgaggtattcacacaattaagatgaaagggaagactagttggtacttttcctgcacctgcagccaataactagaaaaaccatcccaaattaaaggatggctcataacacaaacatatatgaaaatgcattacggtgaagttatgaagcacatttatcttgacactacggttatccaaatggagatgttccagcgcacaaaaagactcaaagaacctagtaatgtgatgtcttgattccaggatatagtctcccctaagagcaagcgataattgtgccagaagaggaatagttttcaaataaataaagcttactctgcctttgaagtcaagggacttcagttttgggggcattagtttcaatgacaccgatgtaattatctgagatttcaagcaccaattgctcgatgtcacgatccaaatttcggagtcgtgatggcgcctatcgtggaaccaggccagccacctaactataatagttctaggttcggttattggagaaaatgctcatttttagtaaatccaaatcaataatagtggaaattcataatttgaaaacaatttaaggaaggaaaactaaattcaaatactacagcctcggattcggtgtcacgcagtcatgagctactaatacataaacaagacccaaaagaaatgactaacatagtctgaaagtaaatacgacaagtagaagagaaagagatgacgagatcccggtctccagctgctacctcgtcaactccgatgaactgctgcgactcactgaccagagctggatctcgatgtacctagatctgcacacaaagtgaagggtataacatgagtacaccaactcaataagtaacgaaaataacctataggctgagaggtagtgacggactaaacctctgataatttgaacaacaacatatagtttgaacatgacagtaatatagtagaaagtaagcgaaatgcaccgatttatgtctgtaaacttgcatatgtttgtgtaaaatcaggaatgctatgtatacagtatccactcttataaggaagtccactcagtactcgaattggccatcaggcccagggaaaatccatcccagaatatggataaatacagtgacatagtcactcggtactgaggaaaaagaaaggccaatccagccccacgaagaagatccatctccggaacaagacaccacggagaagatcctgtgatgacccaaaaggtcatcctaagtaattctagctaaatctgtgtttcgaggccccgaaagcctccgttaatctcacctcgatatacgtgcgtagcccgggcatgtagccgggaagcttctatgtgaaaatttgataaaaatggaactttgaattgaataattgaataaagttgactttggtcaacatttttggtaaacggacccgtacccgtgatgtgacggtcccggagggtccgtaggaaaatatgggacttgggcgtatgcccggaagcgaattccgaggtcccaagcccgagaaatgaatttttaaagacaattattttctgaaaataataaaggattttgaaagtgaataattatgtgaaaaccgtgttaccgggcccgtattatggttccggagcccagaacaggtttattatgtgttatgtgacttatctgttaaatttggtataaaacggacttgaaatgacgtgattcggatataaaatgggaaattaaaaagtttatgaagtttgagaaaattctatagatttcggagtttaattcattgttttgatgatattttgatgggttaaagcttgaacaagtttgtatgatgttttgggagtcgtgtatgttattggttttgagccccgagggctcgggtgagtttcaggtaggtgtcggagtgcaaaaagggttgaaaaatctggtgttttgactgattttctgatatctggtgtctactcagtgcgatcgcatacatagacccgcgatcgcacaactttgtgttagggggagagtcagttcttatatgcgatcgcatagcaaggggcgcgatcgcataggaatataggtatccgggtgggactggtccaatatgcaatgcgatcgcactatcatgcccgcgattgcagagcttgtcagtccctcctctatgcgatcgcattcctatctccgcgatcggcataggctaatttttgccccagttattttattaagtctagaacagacccattacgggattttgccattcttcacccttttcttcttccccaacctccataaccgagaatcaagctccccaacctccataactctataggtaagtgctcttaacctcgttttctcttatttcttcaactaatcactagattctaggcctaaaacatggaaattaaggtagaaattggggtttttgggaaaaaattggatgatttaacctcaatttggggtcggatcctaaaactaattacataattgaactcgaggggttatgggtgatcgggttttggtccgaacctcgagtttagaccacgtgggctcggggtcaaattttggtaattttggaagaatgctagaaattgaatatctaggctaggggattattttattgagtctttattgatattattgaattaattatgcatagataacgttgtttcggagtcggattataaaggaaaggcggtcttagagggttgattgccatactttggaccaaggtaagtgtcttgcctaactttggtgagggaatatgtattaattgctatgtgctaagtgattatcatgttcattgcataggtaaggtgacgagtacctatgcaatgtgtgtcaagcatgtccgtgagtctaattgatagaaattgcagtatttctttcatgtttagcatattatgagattgtctttacttggtaatttagtcgtgattgaaagtattggttgttgagtttgagaagtattgatacgaaagataatacaagtgtagagtatgtgattgaggtgattggttatagctgagacccttgctgggcatttcttgagctattaattgatgttaccccccttgtcgggtgttctgaactgcttatttccactatgatgtactccttgacatttattcgttattgtttggtgaggaagagtgtaaagcacgaagggtgatgccgtgccattatacttgattacattgcatagtgaggaagagtgtaaagcacgaaaggtgatgtcgtgccatgattcatatttattataagcacgaaggttaatgtcgtgccatgatacatcgtatatttcattgtgaggaagagagtaaaagcacggagggtgatgtcgtgccatgatatttgattacattgcattgtgaggaagagagtaaaagcacgaagggtgatgccgtgccattgtttacttttctgatatttatacttgcttcgtgggctattgtactagatgcctcccttgttcacttctatctgtcgatttgactgcttcatttcatttgttcccccttactgtcccgcatcccttatctgtttgattatctcttgcctcgtattatccctgtacctgttgtagaataggacaggttattgctattgtcaagtctagtctcgtcactacttcggccgaggttaggctcggcacttactcagtacatggggtcggttgtactgatgctacactgcacttcttaatgttgtgcagatcacgcatccggacccactggaccgcattgagggagtcacctttagtccacccatagcttcaaggtatacccgctggcgttcgtgggcctctggtgtctcgactgcttttggatcctcattgtcttactttttctcctagtttcaagataattgtatatttcttttcagactttgtatttagttctcagtttagatagttcgtgaggttgtgacaccccgattttgggattgttcgttggatttgtcttatcatttcattatgcgtttttgaggtaatattattatttttctgctgtgaaatgtttgaagtgatttgggatgttcagtaaaaatcgagagttaatggtgtggatgtttttcgaaaaaggttggacattaatgaattcgagttatttcagtaaatgtttgaaggttaatagttttaaatactgttacgttgtgttattaagacaataatgctgtatatgttggcttgtttagcaggttcaacgttagacgcagtcacgtcctgaaaggtgggatttcgggtcgtgacaagttggtatcagagctctaggttgcttaggtctcacaactcacggacaaccttggtagagtctgagggatcggtacagagacgtctgtatttatccctcagaggctgctaagttaggatactcctcttcttttcatactctatcgtgcgttgtatattttggtatactgatcgagtttttattctattttctcgcagatggcgaggacgcatgcttcccttggttccgctcagcagcccgacactcctgctacatctcctacgtcgaggtcgaggacgaggccgtgctagaggccgaggccagggcagggctcagcccagagtagcagccccagtagaggaccctcaggtcgagtctgacgaggaggtcccagttccgacagtcccagttggaccagcacaggtcccagaggggttcatagctaccccagtgcttcaagacgctcttgtccgtctggtaggacttatggagagtgtggctcaggccggtcttcttcctacagctccagccggatctcaagctgggggaggtatccagactcctattattcatacaccagagaaggttgccactcagtttcagactccggcacctcagccagccggagtagcacagccaggtattgcagcacctgtagctgagggagcagctatgtcagcagatgcgttgtggagattggacagattcaccaagttattcactgctacttttactagtgcaccgttagaggacccacaggattatttggacagttgtcatgaggttcttctgaacatgggtatagtggagtccaatggagttgactttgctacttttcgactatctggcgcagacaagacttggtggagggactactacttagccagatcagttgggtttgcatctttggcttgggctcagttcacagaggtatttttggggaagttccttcccattactcagcgagaggatcttaggaggcagtttgagcgccttcagtagggatctatgtctgttactcagtacgagaccaggttcatcgctctagccaggcatgcattgatgatactccccactgatcggagagagttcggaggttcattgagggattggcccagcctatacgactccagatggccagggagtcgagtactgatatttcattccaggatgcggccgatatagcaaggaggattgagatgattttgtcacagggaggtggtcagggggctgacaagaggccctgtcattttggtagatttagtggagcctcgtctggaggcagggattctttcagtaggggtcatccaccctggccatttcagtcagcacttcaggtatcttcccgtgcaccgtcagttcatgttagcacaccgccagcacctattagtgcacaaccgcttcagagttaccagggtagttatcagggtcgtcagggccagtttccgagtcatcagccacagcagcagagatcttgttatagttgtggtagcccgggcacattaccagatattgcccccgagcttcgagtggacccgagtatcaagactcccgtgccgtggttctcgcagcaggtgtacccttaccccctcatccagctagaggtggtggtcgaggtgctagaggtggtggtcaggttcatagaggtggagaacaggccgcgaggggtagaggccaggttgcagcaggtagacccaaggatgttcagattgaggggctcagcaccggtgttatgcttttcatgctcgtcttgatgctgaggcttctgatgtagttattacagttacggtttcagtttgcagccgagaggcttcagtgttatttgatccgggttctacattctcctatgtgtcttcatattttgccccttatttgagtatgcctcgtgattctctgagtactgctgtacatgtgtctacaccgttgggtgatgctatagtggtagatcgagtctaccgtgcttgcgcaatagttattggcggtctggaaactcaggttgatcttttgcttcttgatatggttgattttgatgttatattggggatggactggttatctccctatcatgctatcttggactgtcatgccaagacagtgaccttggccttgccaggagtacctcgtttagagtggagggggactcattgtcatttttctagtagagttgtttcttatataaaggctcggtgcatggtcgagaagggttgcttggcctatttggcctatgttcgtgattctagtgctgaggttccttctatcgagtttgtgcctgtggttcgcgagtttccagaggtattccctgctgacctgccgggtatgccagccgacagggatattgacttttgtattgagttggctgagggcactcagcccatttctattcccccgtatcgtatggctccgccagagttgaaagaattaaaggaacaattgcaagattttttggataaaggcttcattaaggcctaggtgtatatccttagggtctctagtgttgttcgtgaagaagaaagatggctcaatgaggatgtgcattgactaccgacagttgaataaggttactatcaagaacaagtatcctttgccgagattgatgacttatttgatcaacttcagggtgatacagtattctctaagatagacttgagacctggttatcatcagttgaggatcagagcatctgatgtgccccaagacagcttttccgcactcgttatgggcattatgagttattggtcatgtcgtttgggttgaataagcccccgctgcttttatggagttgatgaatcgggtattcaggccttatttgcactcgttcatcattgttttcattgatgatattttgatatactctcacagccgagaggagcatgagcatcaccttagagtcgtcctccagaatctgagggataggcagttgtatgccaagttttctaagtgtgagttctggttgagttttgtggcattcttgggcgacgtcgtatcggcagagggcatctagggtggatccagagaaagtttcggcacttagagattggcctaggcccactcagccacagagattcagagttcttggcctagcaggctatatcgccggtttatggagggttttcatctatagcagccctatgactaagttgacgcagaagagtgctcagttcagatggtcgggaggagtgtgaggcgagcttcagaagctcaagacagcattgaccacatcaccagtgttggtacctgcgcacaaagttcaagttcttattccgtgtattgtgatgcttcgcgggtaggacttgtgcggtattgatgcaggagggcagggttatagcctacgcatatcgctagttgaaaattcatgagaaaaacctatccagtccatgatctggaacttgcatctattgttcatgccttgaagatttggaggcactatttgtatggggtgtcgtgcgaggtgttcactgatcataagagtttgcaatacttgtttaagcaaaaggaagttgaatatgaggcagaggaggtggttagagttgctgaaggattatgatattactattctctatcatccgggaaaggccaatgtggtggccgattgctttgagccgtaagtcggtcagtatgggtagcttggccttttatcagtggggagagcgacctttggctttgtatgttcaggtgttagccaaccgatttgttagattggaggtttctgagagtggcagtgtgtctgtcccataccgttgctcgttctctcattgtatgattgtattcgcgccaggcagtatgatgatcgtcacttgtgtgctctagagatgcggtttggtacggacgtgccaagcaagtcactagttgatgctggggaagttttgagattgcagggtcgtatatgtgttcctaatgtggatgacattcatgagttgatgttgcaggaggcccatagttcccggtattccattcatccgggccgccgcgaagatataccaatacttgcggcagaattattggtggcgtaaaatgaagaaggatattgtaacttatgtagctcggtgcttgaaattgtcagcaggttaaatatgagcaccagagacccggaggtttaatgcagcaaatccagcttccctgtcacgacccaaattcccaccctttgggccgtgactgcgcctaacgttgaacccgctaggccagcaaacgtataacttgcaatagtaatttataatcatttaatactgaatgaaacgatggtcgtcacttttaacaaatttccaacaaatcctgtacacattttcttaataaagataaggaaaaccttaagcatgcgaagaataaagacatgataaacttaaacaacgtaaccggtgtgtcacaatctcacggactaactactggaatactaaatacaagtctggaaatgaaaatactacactgtcttggaaataataagaagacaatgaaatgataaaggagagaagcctcgggatccacgaacgccagtgtatacctcgagctctggtgtggattgaaggtaactccctcagaacgctccacgggtccgatagcagggtctgcacaacacaaggaagtgcagtgtagtatcagtacaaccgaccccatgtactgagtaagtgccaagcctaacctcggccgaagtagtgacgaggctagacttgacttaaacgataacctgtcctattctacaacaggtaataggaaatagcatgaagcatgggataaaccagcaagtaggggatacaggagcagaaagaggggaacaaggggaatgaaacaactacatcgacagatagaagtaatccagtgaaacaagccaatataattgacaacgaaataaattataaaaaaaaatggcacgggtgctttttctcacaatgcaattcaatcaaacataaacaatggcacggcatcacccttcgtgcttttactctcttcctcacaatgcaatgtcaatgaaatatggcacggcatttaccttcgtgcgtataataaataaatcatggcacggtatttaccttcgtgcttataatcaataaaatcatggcacggcatcacccttcgtgcttttgcactcttcctcactatgcaatgaaatcaagtattatggcacggcatcacccttcgtgctttacactcttcctcaccaaacaataacaaataaatggcaaggagtaccgcatagtggaaacaaacaattccacaacacccggcaaggggaaaatatcaagtaataattcaaggaatgcccggcaagggtctcagctataaccaatcactttaatcacgttctctacacttgtattaccattcgtatcaacactttctcaaactcaatgaacaatactttcaacaaatataagtcaccgagtatagacaatttcataatatactaagcatggaagaaatactgcgtttatatcaaaatagactcacgggcatgcttgacacacattgcataggtactcacctcacctatgcaatgaacatgatattcacttagcacatagcaattaatacctattccctcaccaaagttaggcaagacacttacctcgggtccaaaatatagcaatcaaccctctaagaccgcttttccttttgaattcaactccggaaccacaatatctaagcataattaatttgagtgtatcaataatgactcaataaatcaaacccgtagtctaattatctatttctaatcattcttcctaaaattccaaaatttaaccccgggcccacgtggtcgaaactcgaggttcggaccaaaacccgatcacccatatccccacgattaagaatatacaatttgttttaagattcgaccccaaattggggttgaatcacccaaaaatccaaaaacctaatactacccaaaaaccccactttcctaattgatttcatgagtttaggcctagttttctagtgattaatgatgttaattgaacgaaaacaaggttacgaagcttacccgagtagcaagggaggaaaaatgagctcaaggctcgctaatggaggttggggatgaaggaagggttgaacttttaataatacccgcaagtgttctgtttttggacttaaaaattagaattaactgggcgatttccgcacctgcggaaaattagtcgcaccagcgatcccgcaggtgcggaaaagaggtcgcacctgtgatcatgggccagcccaggaggggcctctcctgcggacaaagctccgcccctgcgaggccgctcctgcggggatttggtcgcccctgcggggaaaatcccgcgcctgcgaggcttggaccgcgcctgcggtctcgcgcctgcggaatgagttccgcacctgcggactctgggcaaaaagggctggggtcgctcctgcgaggctgggaccgcaggggcggtcccgcacctgcggctgggcaaccgcacctgcggtcacaccagctgctgtgcaccagcagtggtgaattgctggtttttggcctcgtgcggggtccgggaggcacctgggcccacccgagcccccgtccaaatataccaacaagtcctaaatcactaggcggactcactcgaactttcagaacacgaaaaacaacagcggaactcgcatcaagccccaagacttatttaatcaacacttaggaacttaaaattcaagaattcatttcaaatacgccgaaccggcctaaactgctcggaatggcatcaaactttacagataagttataattgacaccacggaactattcccaatctcggaatctcactcggacctcgaacatcacatcactttccaagccacatttccatttctttaaaacttccaaaacctcattttgatccgaaaccactcaattcacgcccgttttacaccaaattttacaaataagacaattaatatataataaacctgttccgggctccgaaccataatacggcccggtaacactgttttcacataattattcactttcttattcctttattattttcagaaaataatttcttttaaaaattcatttctcgggcttgggacctcgaattcgattccgagcatatgcccgagtcccatattttcctacggaccctccgggaccgtcgaatcacgggtccggatccgtttgccagaaatgttgaccaaagtcaactatattcattcattaattatcaaaaactcatttttcatcaacttttcacataatagcttcccggatacacgcccgggttgcgcacgcataacgaggtgagactaacgagactctcgagcctcggaacacagataaggcttaaattacataagatgaccttttgggtcatcacaatctccacctctaaaacaaacgttcgtcctcgaacggacatcgagaaatacctgagtctgagaatagatggggataacgactcctcatatcggactcggactcccatgtagctgctcgcagggctgacccctccactgaacacggacgaaggaatactcttcgactcaactgtcgaacctgcctatctagtatggctactggctcctcctcataagtcagatccttgtccaattggacaccgctgaaatcaagaacatgagacggatctgcaatatacctcggagcatagatacatgaaaaactggatgcaccgctgataaatgcggcggcaaggcaagtctgtaggccacctctcctaccttgtccaaaatctcaaatggaccaatatacctaggctcaacttgcccttctttccgaatctcatcacgcccttcataggcgacactcgtaggaacacctgatctcctaccatgaaagccaaatctcgaactttacggtctgcatagctcttttgcctggactgagctgtacgaagcctatcctgaataatcttcactttccaaagcatcctggactaactcagaacccaataacctagcctctccgggctcgaaccatccgactggagaccgacatcgcctaccatacaacgcctcatacggagccatctgaatgctccgatggtgtttttgttgtaggcaaactctgctaacggtaagaactgatcccatgaaccaccgaagtcaataacacatgcccgcaacatatcctctaaaatctgaatagtgcgctcggactggtccgtccgtctgaggatgaaatgcggtactcaactcaatctgtgtgcccaactctcgctggaacacccctccagaaatgggaggtaaactgggtacctctgtctgatataatagataagggcacaccgtgcaatctgacgatctctctcatataaatctgagctaacttctccactgaagatgaaactgccaccggaatgaaatgtgcctgacttgtcagcctatccaccacaacccatactgcatcaaccatcctctgggtccgtggaagtccaactacaaaatccatcgtgatacgctcccacttccactcgggaagctgaatctgctgcatcaaaccacctggtctctggtgctcatatttaacctgctgacaattaaagcaccgagctacatatgccacaatatccttcttcattctacgccaccaataatgttgtcgcaagtcctggtacatcttcgcggcgcccggatgaatggaatacctggaactgtgggcctcctgcaatattaaactcacgaaggccatcaacatcgggtacacatatacgtccctgcaatctcaaaactccctcagcatcaattgtgactgcctggcacgtctgtgccgaaccgcatctctaagggcacataagtgacgatcatcatactgcctggcgcgaatgcgatcatataaagaagaacaagcgacggtatgggccaaaacactgccaccctcagaaacctccaacctgaaaaatcgattggctaatgcctgaacatccaaagccaaaggtcgctctcccactgatagataagccaaactacccatgctgactgacttccggctcaaaagcatcggccaccacgttggccttccccggatgataaagtatggtaatatcataatctttcagcaactctaaccaccttctctgcctcatattcaactccttttgcttaaacaactattgcaaactcttatgatcagtgaacacctcacacggcaccccatataaatagtgcctccaaatcttcaaggcatgaacaatagctgcaagttccagatcatggactggatagttcttctcatgaatcttcaactggcgagatgtgtaggctataaccttgccctcctgcatcaataccgcaccaagtcctacccgcgaagcatcacaataaacggtataagaccctgactctgtgggtagcaccaacactggtgctgtggtcaatgctgtcttgagcttctgaaagctcacctcacactcctcagaccatctgaactgagcactcttctgcgtcaacttggtcataggagcccgctatagatgaaaatccctccacaaaccggcgataatagcctgctaggcccaagaaactctgaatctctgtggctgaagtgggcctaggccaatctctaactgctgaaactttcttcggatccacctgaataccttctgccgacacaacatggcccagaaatgccactgaactcaaccagaactcacacttagaaaatttggcatacaactgactatccttcagagtctggaggacgactcgaaggtgttgctcgtgctcctctcggctgcgagagtatatcaaaatatcatcagtgaaaacaatgacgaacgagtacaaataaggcctgaatacccgattcatcaactccatgaaagcagcgggggcattagtcaacccaaacgacatgaccaaaaactcatagtgcccacaacgagtgcgaaaagccgtcttgggcacatcagaagccctaatcctcaactgatgataaccagacctcaagtctatttttgagaacaccgtagcaccctgaagctgatcaaataagtcatcaatcctcggcaaaggatacttgttcttgactgtaaccttattcaattgccggtaatcaatacacatcctcattgagccgtatttcttctttacgaacaacactagagcaccccaaggagaaacactaggcctaacgaagcctttatccaacaaatcctgcaattgttcctttaactccttcaactctggcggagccatacgatacgggggaatagaaatgggctgagtgccctcaactagctcaatacagaaatcaatgtccctgtcgggtggcatacccggcaggtcagcagggaatacctctggaaactcgcgaatcacgagcagtgactcaatagaaggaacctcggcactagaatcacgaacataggccaagtaggccaagaaacccttctcgaccatgcgccgagccttgatataggaaacaactctaccagaggaatgactaggagtcccccctccactctacacgaggcactcctggcaaggctaaggtcaccgtcttggcatgacagtccagaatagcatgatagggagataaccagtccatccccaatataacatcaaattcaaccatatcaagaagcaaaagatcaacctgagtctccagaccaccaataactattgagcaggcacggtagactcgatctaccactgtagaatcacccaccggtgtagacacatgtacagcagtacttagagaatcacaacgcatactcaaataaagggcaaaatatgaagatacataggagaaagtagaacccggatcaaataacgccgaagcctctcggctgcaaactgaaaccgtacctgtaataactccatcagaagcctcagcatcaggacgagcaggaaacgcataacattagggctgagcccctcctatctaaacatccctcggtctacctgcggtaacctggcctctacccctcgcggccctgtgctccacctctatgaacctgaccaccgcccctggcacctcgaccaccacctctagctgaatgagggggtacgggttcacttgctgcgggaaccacggcacgggatccctgatagtggggtccactcgaagcttggaggcaatatctggcaatgtgccccggactaccacaactataacaagatctctgctgctgtggctgatgactcggaaactggccctggcgaccctgataaccaccctggtaactctgaagcggctgtgcactaataggtgctggcgatgtgctaacatgaactggcggtgcacgcggagatacctgaagtgctgactggaatggccggggtggatgacccctactgaaagaatccctgcctccatacgaggctccactaaatctaccaaaatgacggggtctcttgtcagccctctgacctcctccctgtgacaaaatcatctcaatcctcctggctatatcggccgcatcctggaatgaaatatcagtactcgactccctagccatctggagtcgtataggctgggccagtccctcaatgaacctccgaactctctcccgatcagtggggagtataatcaacgcatgtctggctagagcgatgaacctggtctcatactgggtaacagacatagatccctactggagacgctcaaactgtctcctaagatcctctcgctgagtaatgggaaggaacttccccaaaaatacctctgtgaactgagcccaagtcaactgtacagacccagctggtctggctaggcaatagtctctccaccaagtcttggctacaccagacagccgaaaagtagcaaaatcaaccccgttggactctacgatgcccatgttccggagaacctcatagcaactgtccaagtagtcctgtgggtcttcagaagaagcgccagtgaatgtagctgtgaagagcttggtgaacctgtctaacctccataaagcatctacggacatagctgctccctcagctgctggggatggaataactggcgggaccaatacggctggctgaggtgccggcgtctggaactgctgagctacctgctctggagtgcgagtggcaggagtctgagtacctcccccagcctgagatccggctggagctgtaggaagaagaccggcctgagccatactctccataagtcctaccagacggacaagagcgtcctgaagcactggggtagctatgaacccctctgggacctgtgctggtccaactgggactgccggaactgggacctcctcgtcggactcgatctgagggtcctccactggggctgctgctctaggctgagccctgccccggcctctagtacggcctcgtcctcgacctcgacccctcgtaagagccgtagcaggagtgtcgggctgctgagcggaaccaagggaagcacgcgtcctcgccatctgcgagagaataaaatagaaactcgattagtataccaaaatatactacgcacaacagagtatgaaaagaagaggagtaccctaacttagcagcctctgggggataaatacagacgtctccgtaccgatccctcagactctaccaaggttgtccatgagttgtgagacctaagcaacctagagctctgataccaacttgtcacgacccaaattcccaccctttgggccgtgactgcgcctaacgttgaacccgctaggcagccaacgtataacttgcaatagtaatttataatcatttaatactgaacgaaacgatggttcgtcacttttaacaaatttccaacaaaatcctctaaacattttcttaataaagataaggaaaacgttaagcatgcaaagaataaagacatgataaacttaaacaacgtaacacttcccacagtggtaactctcaaactttactgggcctttcaaatcccttcaattgtttcacagcagagaaataataacaatatcttagaaaaactcaaaacgaaatgataggatatctaccacgaacaatcccaaaaccggggtgtcacaatctcacggactaactactggaatactcaatacaagtctggaaatgaaaatactacactgtcttggaaataataaggaagacaatgaaacgataaaggagagaagcctcgggatccacgaacgccagtgtatacctcgagctctggtgtggactgaaggtaactccctcagaacgctccacggggtccgatagcagggtctgcacaacacaaggaagtgcagtgtagtatcagtacaattgaccccatgtactgagtaagtgccaagcctaacctcggccgaagtagtgacgaggctagacttgacttaaacgataacctgtcctattctacaataggtaataggaaatagcatgaagcatgggataaactagcaagtaggggatacaggagcagaaagaggggaacaaggggaatgaaacaactacatcgacagatagaagtaatccagtgaaacaagccaatataattgacaacgaaataaataaatatcggaaacataaacaatggcacggcatcacccttcgtgcttttactctcttcctcacaatgcaattcaatcaaatataatggcacggcatttaccttcgtgcgtataataaataaaatcatggcacggtatttaccttcgtgcttataatcaataaaatcatggcacggcatcacccttcgtgcttttgcactcttcctcactatgcaatgaaatcaaatattatggcacggcatcacccttcgtgctttacactcttcctcaccaaacaataacaaataaatggcaaggagtaccgcatagtggaaacaaacaattccacaacacccggcaagggggaaaatatcaagtaataattcaaggaatgcccggcaagggtctcagctataaccaatcactttaatcacgttctctacacttgtattaccattcgtatcaaccctttatcaaactcaatgaacaatactttcaaccaataataagtcaccgagtatagacaatttcataatatactaagcatggaagaaatactgcggtttatatcaaaatagactcacgggcatgcttgacacacattgcataggtactcgtcacctcacctaggcaatgaacatgatattcacttagcacatagcaattaatacctattccctcaccaaagttaggcaagacacttacctcgggtccaaaatatagcaatcaaccctctaagaccgcttttccttttgaattcaactccggatccacaatatctaagcataattaatttgagtgtatcaataatgactcaataaatcaaacccgtagtctaattatctatttctaatcattcttcctaaaatttcaaaatttaaccccaggcccacgtggtcgaaactcgaggttcggaccaaaacccgatcacccatatccccacgattaagaatatacaatttgttttaagattcgaccccaaattgggttgaatcacccaaaaattccaaaaacctaatactacccaaaaaccccactttcctaattgatttcatgagtttaggcctagttttctaatgattaatgatgttaattgaacgaaaacaaggttacgaaacttacccgagtagcaagggaggaaaaatgagctcaaggctcgctaatggaggttggggatgaaggaagggttgaacttttaataatacccgcaagtgttctgtttttggacttaaaaattagaattaactgggcgatttccgcacctgcggaaaattagtcgcaccagcggtcccgcaggtgcgaaaaagaggtcgcacctgcgatcatgggccagcccaggaggggcctctcctgcggacaaagctccgcccctgcgaggccgctcctgcggggatttggtcgcccctgcggggaaataccgcgcctgcgaggcttggactgcgcctgcggtctcgcgcctgcggaatgagtttcgcacctgcggactctgggcaaaagggctggggtctcttctgtgaggctgggaccgcaggggcggtcccgcacctgcgactgggcaaccgcacctgcggtcacaccagctgttgtgcaccagcagtggtgaattgctggtttttggcctcgtgcggggtccaggaggcacctgggcccacccgagcccccgtccaaatataccaacaagtcctaaatcactaggcggactcactcaaactttcagaacacgaaaaacaacagcggaactcgcatcaagccccaagacttatttaatcaacacttaggaacttaaaattcaagaattcatttcaaatacgccgaaccggcctaaactgctcggaatggcatcaaactttacagataagttataattgacaccacggaactattcccggtctcggaatctcactcggacctcgggaacatcacatcactttccaagccacatttccatttctttaaaacttccaaaacctcatctttgatccgaaaccactcaattcacgcccgttttacaccaaattttacaaataagacaattaatatatagtaaaactgttctgggctgcgaaaccataatacgggcccggtaacactattttcacataattattcactttcttattcctttattattttcagaaaacaatttcttttaagaattcatttctcgggcttgggacctcggaatttgatttcgagcatatgcccgagtcccatattttccaacggaccctccgggaccgtcgaatcacgggtccggatccgtttgccagaaatgttgaccaaagtcaactatattcattcattaattatcaaaaacttatttttcatcaacttttcacataatagcttcccggatacacgcccgggctgtgcacgcataacgaggtgagactaacggagactctcagagcctcggaacacagataaggcttaaattacataagatgaccttttgggtcatcacattcccgtgtggaagtgggagcgtatcacgatggattttgtagttggacttccacagacccagaggatggtttatgcagtatgggttgtggtggataggctgaccaagtcagcgcatttcattccggtggcagtttcatcttcagcggagaagttagctcagatctatatgagagagattgtcagattgcacggtgtgcccttatctatcatatcggactgaggtactcaatttacctcccatttctggagggtattctagtgagagttgggcacacagatcgagttgagcacaatatttcatcctcagacagacagacagtacgagcgcattattcagattttggaggatatgttgcgagcttgtgttattgattttggtgaatcatgggatcggttcttgcctttagcagagttttcctacaacaacaattaccagtcgagcattcagatggctccgtatgaggtgttgtatggtaggcaatgtcggtctccagtcggatggtttgagcccggagaggctagattattgggttccgagttagtccaggatgccttggataaagtgaaaattattcaggataggcttcgtacagctcagtccaggcagaagagttatgcagatcgtagagttcgagatttggctttcatggtaggagaccaggtgttccttcgagtgtcgcccatgaatggcgtgatgagattcggaaagaagggcaagttgagccctaggtatattggtccatttgagattttggacaaggtaggagaggtggcctacagacttgccttgccaccacatttatcaacagtgcatccagtgtttcacgtatctatgctccggaggtatattgcagatccatctcatgttcttgacttcagcggtgtccatttggacaaggatctgacttatgaggaggagccagtagccatattagataggcaagttcgccagttgaggtcgaagagttatccttcggtctgtattcagtggagaggtcagcctgccgaggcagctacttgggagtctgagtccgatatgaggagtagttacccccatcttttctcaggctcaggtacatttctatgttcgtttgaggacgaacgtttattttagaggtggagattgtgatgacccaaaaggtcatcctaagtaattctagctaaatctgtatttcgaggcaccgaaagcctccgttaactctttgagagtaaatagtaccaaccaaattggataaagtgagtagttgataaaccctaaaaccaagggcatgttaagcattataaattacgaagataatgagggtattttcaagtgataaaatttgttaaacattccataagtacctttgctcgccttcaattagacacttcaaaatatataacatatatcaaattccattaaaaaaaataatatccacaaaatattataaaccctaacccatacaaatattacaaacccatatcaaattatttgtctcttctttttggtgccaaaaaatgagagggaaacattaagttgtctagtaacagacaaacaacaaaatttgcatttgtgaaaatgatgaatgattcacatgatcacaacacgaaacataagaaaattaacacacgacatgtaatagaatagtcattacgcacactgaaattctaaatacaatttcagcttcatgtgacagaatagtcattacgcatgtaacagaaaattaacacacagcatataccagtactagttaatttgaactttgaatacaatttctgcttcaggtgatgcacactgaaattctgactgctcaattagtgatttgatactttcataatattcataggttaatgcctcaattttgattcttcgaagagtcagagacttcgccaaaagaagcttgaccagttgcatgtgaggatttgtccctcgaatattcctaatcacaattaatctgatgtggttgaatattgtatctccaaatcttccttccaaattaatgttatccagagccaaaagtaccccactattatccacctaagtataaaaaacaccaaattttaatgaggatcgaaggtataaagaagccactaagtaacgagaattaaataaaagacttatgatgattaagtaagaaccttgattttcagatattgtaaatatggaaagcttctcatcaagcacaaagcacaagcgatgaaatataattcactatgtaaaagatcatcgaggtattcacacaattaagatgaaagggaagactagttggtacttttcctgcacctgcagccaataactagaaaaaccatcccaaattaaaggatggctcataacacaaacatatatgaaaatgcattacggtgaagttatgaagcacatttatcttgacactacggttatccaaatggagatgttccagcgcacaaaaagactcaaagaacctagtaatgtgatgtcttgattccaggatatagtctcccctaagagcaagcgataattgtgccagaagaggaatagttttcaaataaataaagcttactctgcctttgaagtcaagggacttcagttttgggggcattagtttcaatgacaccgatgtaattatctgagatttcaagcaccaattgctcgatgtcacgatccaaatttcggagtcgtgatggcgcctatcgtggaaccaggccagccacctaactataatagttctaggttcggttattggagaaaatgctcatttttagtaaatccaaatcaataatagtggaaattcataatttgaaaacaatttaaggaaggaaaactaaattcaaatactacagcctcggattcggtgtcacgcagtcatgagctactaatacataaacaagacccaaaagaaatgactaacatagtctgaaagtaaatacgacaagtagaagagaaagagatgacgagatcccggtctccagctgctacctcgtcaactccgatgaactgctgcgactcactgaccagagctggatctcgatgtacctagatctgcacacaaagtgaagggtataacatgagtacaccaactcaataagtaacgaaaataacctataggctgagaggtagtgacggactaaacctctgataatttgaacaacaacatatagtttgaacatgacagtaatatagtagaaagtaagcgaaatgcaccgatttatgtctgtaaacttgcatatgtttgtgtaaaatcaggaatgctatgtatacagtatccactcttataaggaagtccactcagtactcgaattggccatcaggcccagggaaaatccatcccagaatatggataaatacagtgacatagtcactcggtactgaggaaaaagaaaggccaatccagccccacgaagaagatccatctccggaacaagacaccacggagaagatcctgtgatgacccaaaaggtcatcctaagtaattctagctaaatctgtgtttcgaggccccgaaagcctccgttaatctcacctcgatatacgtgcgtagcccgggcatgtagccgggaagcttctatgtgaaaatttgataaaaatggaactttgaattgaataattgaataaagttgactttggtcaacatttttggtaaacggacccgtacccgtgatgtgacggtcccggagggtccgtaggaaaatatgggacttgggcgtatgcccggaagcgaattccgaggtcccaagcccgagaaatgaatttttaaagacaattattttctgaaaataataaaggattttgaaagtgaataattatgtgaaaaccgtgttaccgggcccgtattatggttccggagcccagaacaggtttattatgtgttatgtgacttatctgttaaatttggtataaaacggacttgaaatgacgtgattcggatataaaatgggaaattaaaaagtttatgaagtttgagaaaattctatagatttcggagtttaattcattgttttgatgatattttgatgggttaaaagcttgaacaagtttgtatgatgttttgggagtcgtgtatgttattggttttgagccccgagggctcgggtgagtttcaggtaggtgtcggagtgcaaaaagggttgaaaaatctggtgttttgactgattttctgatatctggtgtctactcagtgcgatcgcatacatagacccgcgatcgcacaactttgtgttagggggagagtcagttcttatatgcgatcgcatagcaaggggcgcgatcgcataggaatataggtatccgggtgggactggtccaatatgcaatgcgatcgcactatcatgcccgcgattgcagagcttgtcagtccctcctctatgcgatcgcattcctatctccgcgatcgcataggctaattttgcccagttattttattaagtctagaacagacccattacgggattttgccattcttcacccttttcttcttccccaaacctccataaccgagaatcaagctccccaacctccataactctataggtaagtgctcttaacctcgttttctcttaatttcttcaactaatcactagattctaggcctaaaacatggaaattaaggtagaaattgggtttttgggaaaaaattggatgatttaacctcaatttggggtcggatcctaaaactaattacataattgaactcgaggggttatgggtgatcgggttttggtccgaacctcgagtttagaccacgtgggctcggggtcaaattttggtaattttggaagaatgctagaaattgaatatctaggctaggggattattttattgagtctttattgatattattgaattaattatgcatagataacgttgtttcggagtcggattataaaggaaaggcggtcttagagggttgattgccatactttggaccaaggtaagtgtcttgcctaactttggtgagggaatatgtattaattgctatgtgctaagtgattatcatgttcattgcataggtaaggtgacgagtacctatgcaatgtgtgtcaagcatgtccgtgagtctaattgatagaaattgcagtatttctttcatgtttagcatattatgagattgtctttacttggtaatttagtcgtgattgaaagtattggttgttgagtttgagaagtattgatacgaaagataatacaagtgtagagtatgtgattgaggtgattggttatagctgagacccttgctgggcatttcttgagctattaattgatgttacccccttgtcgggtgttctgaactgcttatttccactatgatgtactccttgacatttattcgttattgtttggtgaggaagagtgtaaagcacgaagggtgatgccgtgccattatacttgattacattgcatagtgaggaagagtgtaaagcacgaaaggtgatgtcgtgccatgattcatatttattataagcacgaaggttaatgtcgtgccatgatacatcgtatatttcattgtgaggaagagagtaaaagcacggagggtgatgtcgtgccatgatatttgattacattgcattgtgaggaagagagtaaaagcacgaagggtgatgccgtgccattgtttacttttctgatatttatacttgcttcgtgggctattgtactagatgcctcccttgttcacttctatctgtcgatttgactgcttcatttcatttgttcccccttactgtcccgcatcccttatctgtttgattatctcttgcctcgtattatccctgtacctgttgtagaataggacaggttattgctattgtcaagtctagtctcgtcactacttcggccgaggttaggctcggcacttactcagtacatggggtcggttgtactgatgctacactgcacttcttaatgttgtgcagatcacgcatccggacccactggaccgcattgagggagtcacctttagtccacccatagcttcaaggtatacccgctggcgttcgtgggccttggtgtctctactgcttttggattcctcattgtcttactttttctcctagtttcaagataattgtatatttcttttcagactttgtattttagttctaagtttagatagttcgtgaggttgtgacaccccgattttgggattgttcgttgttgttgtcttatcatttcattatgagtttttgaggtaatattattatttttctgctgtgaaacgtttgaagtgatttgggatattcagtaaaaattcgagagttaatggtgtgggatgtttttcgaaaaaggttggacattaatgaattcgagttatttcagaaaatgtttgaaggttaatagttttaaatattgttacgttgtgttattaaggcaataatgttgtatatgttggcttgtttagcgggttcaacgttagacgcagtcacgtcctgaaaggtgggatttcgggtcgtgacagatccatctccagaacatatcactcggacaagatccatgtctagggaagatccatccctcaatatttgtgcgatcactgggggtgtaaagactccggtggggctcctataagcccaagcgctatatcaagctaacaaaggcatgatccaaggatcgttgcggtgtgcaacccgatcttataactgtctcaaaatccggctctaggccccactcaatcaatactttccaatctcactcaccatgctctcagatatatatctataattcagcccaaacaacgataatatgaaaataactaacaatttctgaaactaaggcatgagaatgtctgagcgcataacagggaataaccataaatagagacagcaacaattgaccattcctgtctaaacacattggcgcgaagccttagcatttacacttatcatgatttctaatatgttgaaggaagtctctaccttcacagtaccaatatcagtatgaaacaacccttagacagtgccatgggatgagccaggccacaaacattcggtgactgcccgcattcccgtcacttggcaagtgagtcaccttaattaacatcaattatcagataatttggggtttcaaaccttcagttccaaggttgaagacgttaattacctcaaaaccggctaaaacactactccgcagtgcacttgcctcgaaatttgaccttcgagcgctccaaatctaccaacaatcaagtgtatatcattattatattctaataggtgaataccaataaatatttatcaagaacactcataaatcccgaaattggccaaagccgacccccgggcccacgtctcggaattcaaaaaaatttacaaaactgaaatccttatcttcacccgagtctacccatatcaaatttaccaaaatccaaccacaattaccccttcaaatcatcaaaagagtctcccaacttttcttcccatttttctcaatttctactttgattccacaaattacatggaaataatcaaatactaattcgtgaaattagaccaaaaacaatcaaggaatacttaccacaagactcccactgaaaatctctcaaaaatctcccttctcccgagctctctaatggagttttgaaaaatggctaaaaaccctcatttttgaacttaaagtttctgcccagtgatttccttctacgcgatcgcggacatcctgtcgcgattgcggagagtaactcaatagccccagatttaaccttacgcgatcgcggattcctccacgcgatcgcgaagcaccaaaaatcaaacccacgcgatcgcgaagagataattgatcccccttcacacgcgccctgcacaccaacgcgatcgcagacttctccaagcgatggcggagaacaacctcccatacctttgcgatcgcgaactttttaatgcgattgcaaagacaaattcgaccccctactcagctaagcctacgcgatcgcaggatacccctagcgatcgcggaagaggaaatcagatggaaaaaaacaccagaaaatctgccaagtctttaagccaaacgttggtccattgaccacccgaaacacacccgaggccttcgagacctcaaccaaacataccaatacgtcctaaatgatcattcaaacttagtcgagccttcgaaacatcaaaaacaacatcaaaactccaaaaattcatcgaattcaagcctatgaacactaaaatttctaaattccaccaacgatgccgaaactacccaaaacaactccgattgatctgaaattttgcagacatatccaaaatgacattacgaacctgttccaactgtcgaaattccattcctaccccgatatcctattttccactgccaatcgaaaatcgccaagaactaactttcgccaattcaagcctaattctacaccgggcatcacaaaaatattccgaacacacttctaaattacaaatcacctaacgaagctatcggagccataaaatccgcactccgaggtcatttaccaataagtcaactccgggttgacttttccaactctaaggctacttttagaggctaagtgactcaattctctctataaccattccgaacccgagctaaccaactctaattcatcatgaatagtctaaccaagctataacaaggcagaagcagtgaacataaatgtatgttctacataacgatcggccgagtcgttacattttccccctcttaaacaaacgttcatcctcgaacgggtctagaaacatacctgaagactcaaacaagtgaggatatctgctccgcatctcccgctcggtctcccaattagccttctttaccggctgacctctccgctgcaccttcactgaaactatctcctttgacctcaacttccttacctcgcgagccaaaatagtcactggctccacctcataagacatatcatcctcgagctgaactgtgttgaagccgagaatatgagacgggttaccaacatacttccggagcatcgacacatggaataccggatgaacactcgataatctgggcggcaaggcaagtttataagccacctccccaaccttctgaagcacctcaaaaggaccaatgaaccggggactaagctttcccctcttcccgaacctcatgacacccttcatgggtgacaccttcagcagaaccttatcacccttcatgaaagacacatcccgaaccttccgatccgcatagctcttctgcctagactgagccgtgcgaagtcgcccctgaatcaacttcaccctctccaacgcatcctgaaccaaatctacgcctaacaacctagcctcaccgggctcaaaccaaccaaccggagatctacacctcctaccatataaagcctcatacggcgccatctgaatactagactggtagttgttattatatgcgaactccgctaatggcagaaactgatcccacgaaccaccaaaatcaatcacacaggcacgcaacatgtcctctaggatctgaatattccgctccgactgcccgtcggtctggggatgaaatgttgtgctcatctctacctgagtacccatacctctttgcatagccctccaaaactgagatgtgaactgagtacctctgtcagaaataatagaaactgggaccccatgcagtcggacaatctccctgatgtaaataccagctaacctctctgaagtataagtagtactgacaggaatgaagtgcgcagatttggtcagtcgatccacaataacccaaatagagtcaaatcccttcgaagtccgtggaagcccaattacaaagtccatggtgatccgctcccacttctactctggaatgactaactcctgaagcaacccacctggcctctggtgctcatacttgacctgctggcaattgaggcaccatgctacatactccacaatatctctcttcatccgcctccaccaataatgttgcctcaggtcttggtacatcttcgcggcacccggatggatggaatactgcgagctatggtcctctgccaagatcaactctcgaagaccatttacgtcaggcacacaaatacggccctgcatccttaaaaccccgtcatcatcaatagtcacatccctaacatcacctcgacggaccttgtcctgaagaaccaacaaatgacggtcatcatactggcgtgctctaatctgatcatatagagaagaccgggaagtcatgatagctaatactcgcgaaggctctaacaaatccaatctcacaagttgccccgctaaggcctgaacatcacgtgctaagggtcgctcttctggtgaaagataggctagacttcccaaactccctgctcagcgactgagggcgtcgaccaccacattagccttccccggatgatatagaattgtgaggtcataatccttgagaagctccaaccatctcctctgatgcaaattcaaatccttctgcctcagcagatactgcaaactgcgatggtcaaaaaaaatctcacattgaaccccatataaataatgacgccaaatcttcaaagcatgaacaatagcagttagctcaagatcatgcactggataattattctcgttcacctttatctgtctggacgcgtaggcaatcaccctaccatcctgcatcaaaatcgctcccaagccaaccctagaagcatcacaatagactgtgtaagaacccgaaccagtaggcaaaattaataccggagttgtggtcaaagctgacttgagcttctgaaatctctcctcacactcatcggaccatctgaatggagcacccttctaagtcaatttggtcagtggtgaagcaatagaggagaatccatccacaaagcgacggtaataacccgccaatccaagaaaactcctaatctccgtagctgaggacggtttgggccaactctacatcgcctctatcttcttcgagtccacctgaataccctcactagacaccacgtgacccaagaaagctaccgaactaagccaaaactctacttggagaactttgcataaagtttctcctctctcaacctctgtaacacaacctgcaaatgttgagcgtgctcctcctggctacgagaatacaccaggatgtcgtcaatgaacacaataacgaatgaatcaaggtaaggctgaaacacgttattcatcaagtgcatgaatgcggctgggacattggtcagcccaaaagacataaccaaaaactcatagtgatcgtatctggtcctgaaagcagtcttcagaatattagaatcccgaatcttcaactggtgataccccgatctcaagtcaatcttggagaacacctttgctccctgaagctgatcaaataagtcatcaatgcgaggcagaggatatcggttcttcaccgtaaccttattcagctgcctgtagtcaatgcacatacgcatagaaccatccttcttctttacgaaaaacaccggtgcaccccaaggtgatacactaggccgaatgaaccccttatcaaggagttcctgaagctgctccttcaattccttcaactctgttggggctatgcggtaaggcggaatagagataggctgggtatctggaaacaagtcaataccaaagtcaatgtccctatcaggtggcatgcctggcaggtctgcagggaatacatatggaaactcacggaccacaggaacagaatcaatagaagaagtctcactactaacatccctcacaaaggccagataagactcacatcctttccaatcatacgatgagccttcagataggaaatcactccactaggcacatactccaccgaacctctccactcaattctcggcaatacgggcatagataaggtcacgatcttggcatgacagtcaagaacagcatggcacggagatagccaatccatgcccaatatcacatcgaagtcaaccatgctaagcaataatatatccacccgggtctacagacccccaatagatataacacaagaccggtacacccggtctaccaacgccgtaacccccactagagtcgacatacgaacaactaaaatcaaggactcacggggcatacccaagaaatgtgcaaagtatgatgaaacatatgaatacgtagaaccgggatcaaacaataccgaagcatctcgatgaaagatggaaataatacatgtaatcactgcatctgaagttgtggcatctggtctggccggaagtgcatagaaacgggcatgtcctccacctgatcgacctccccctctaggaggcctcggacttactgacctccacccctggctgcctgggcgggtggtgtagaaactggtgctgaagatggaggctggctcctctgctgataagaactaccagaaaggcggggacaatacctcttgatgtgacctggatccccacactcgaaacaacccctctcagcaaaagacggtggggtctgacgggaacccctggaaccagagtagctgctagaagagccatgtgctgaagaaccctgaactgactgtggcctggatgagctctgggatggaagtgcactgaatgatgaacggcccagatgagaactacggagaccgtgtcctgatgaagtaccgctgtaaactagacgagctggctgaggaggcttgaatggacgacctctgctatactgagactgacctcccgggtgaccaccaccataactatcagatcctcgaggcctcttttcctccctctaaacacgttactagtggcgcactgactcaatctccctagttatgttaactacctcctcaaaagaagccttagataccctctccctggtcagaaagatccgtaactgataagtaagaccgtcaacaaccttcggatactctatcggtctgtgggaactagccatatggcatgacgggataactcaaataacctcatctcatactgcgtcacggtcatgtctccttgacgcaactgctcgaactctctgcgtaactcctatctgtgagactgtggtatatacttctccaaaaagagaatggagaactggtaccatgtaaggggtgctgcatcagcgggtctacgcctctcataggcctcccaccaagcaagtgcagctcctgagaactggaaagtagtaaatggaactccgctgacctctagtatccctgttgtgcgtagtatcctctgacacttgtccaagaagaactgggcatcctctccctctgtaccactaaaatttagaggttggagtctactgaacctctccaacttacgctgctcatcatcagctaaagttgggaccacataatctagtaccggagcaataggatgcactggaactgccccaggtgtctgaagtccctgggcgacctgctcaggtgtccgggcagctggagtctgaatgcatcccccggcctgagaagtagtagcaagagtggacatcgcaacgccatgtgccaaactggtgcacaccgtcaaaatctgagctaggttctcctgaagacccagaataactatgggcactgctggtgcctgagcctgccccgctggaatctcagctgcagggaccttatcctgagcaacgggagggtctacaggtgcttccccggctgctgtgcgagttgcacccctccctctaccacggcctcgacctctggctggtcctggcagtgcctggtcaccgttgtcggtagcacgagtcatcaccaacaatgagagagtgaaaacaatagaagtttagttcccgagttcaacagagtcgcacgacagaattcaaagatgtggaattttcctaagggttttgtagcctcttgaagataagtacagacgtcactgtaccgatccgcaagactctactaaacctagagctctgataccaacttgtcacgacccaaatttcggagtcgtgatggcgcctgtcgtggaaccaggatagccacctaactataaaggttctaggttcggttattggagaaaatgctcatttttagtaaatccaaatcaataatagtggaaattcataatttggaaacaatttaaggaaggaaaacaaaatccaaatactacagccttggatccggtgtcatgcagtcatgagctactaatacataaacaagacccaaaagaaatgaccaacatagtctgaaagtaaatacgacaggtagaagagaaagagatgacgaggtcccggtcgccagctgctacctcgtcaactccgatgaactgctgcgactcactgatcagagctggatctcgatgtacctggatctgcacacaaggtgtagggtataacgtgagtacaccaactcaataagtaacgaaaacaacttatgggctgagaggtagtgacagactaaacctctgataatttgaacaacagcatatagtttgaacatgacagtaatatagtagagtaagcgaaatgcaccgagttatgtctgtaaacttgcatatgttcgtgtaaaatcaagaatgatatgtatatagtatccactctcataaggaagtccacttagtactcgaattgtccatcaggcccagggaaaatccatcccagagtatggataaatacaatgacatagtcactcggtactgaggaaaaaaaaaggcaatccagccccacggagaagatccatctccgaaacaagacaccgcggagaagatccatctccggaacatatcactcggacaagatccatgtccatggaaaatccatccctcaatatatgtgcgctcactgggggtgtaaagactccggaggggctcctataagcccaagcgctatatcaagtcaacgaaggtatgatccaaggatcgctgcggtgtgcatcccgatctcataattgtctcaaaatctggctctaggccccactcagtcaatactttccaatctcactcaccatgctctcaaatctatatctataattcagcccaaacaatgataatatgaaaataactaacaatttctaaaactaaggcatgagaatgtaggctacaacaggactgagtgtataacaggaaataaccacaaatagagacaacaacaattgaccattccggtctaaacacattggcgtgaagccttagcatttacacttatcatgatttctaatatgttcaagaaagtatctaccttcacagtaccaatatcagtatgaaacaacccttagacagtgccatgggatgagtcatgccacaaacattcggtgaacgcccgcattcccttcacttggcaagtgtgtcaccttaattaacatcaattatcagataattttgggtttcgaaccctcagttccaaggttgaagatgttacttacctcaaaaccggctaaaacactactccgcagtgcacttgcctcgcaatttgacctccgagcgctccaaatctaccaacaatcaagtgtatatcagtattatatgctaagaggtgaatcccaatcaaaatttatcaagaatactcaaaaatcccgaaattggccaaacccgacccccgggcccacgtctcgaaattcggaaaaatatacaaaactgaaatcttcatattcacccgagtctaccaatatcaaatttaccaaaatccaaccacaattaccccttcaaatcatcaaaagagtctcccaacttttcttcccatttttctcaatttatactttgattccacaaattacatggaaataatcaatactaattcgtgaaattagaccaaaaacgatcaaggaatacttaccagtagaatcccattgaaaatctcgccaaaatctcccttctcccgagctctgtaatggagttttaaaaaatgactaaaaaccctcgtttttgaacttaaagtttctgcccagcgatttccttctacgcagtcgcggacatcctgtcgcgatcgcggagagtaactcaacagccccagatttaaccttacgcgatcgcggatgactccacgcaatcgcgaagcaccaaaaatcaaacccacgcgatcgcaaaccctctcacgcgatcgcgaagagataactgatcccccttcacacgtgccctgcacacctacgcgatcgcagacttctccaagcgatcgcggagaacaacctcccatacctttgcgatcgcgaactctttaatgcgatcatgaagaacaaattcgaccccccactcagctaagcctacgtgatcgcaggatacccctcgcgatcacggaagaggaaaccagatgaaacaaaacaccagaaattttgccaagtttttaagccaaatgttggtccgttgaccacccgaaacacactcgagttcctcgggacctcaaccaaacataccaatacatcctaaatgatcactaaaacttagtcgagccttcgaaacatcaaaaacaacatcaaaactccaaaaattcatcgaattcaagcctatgaacattgaaatttctaaactccaccaacgatgccgaaactatccaaaacaactccgattgatctgaaattttgcatacatatccaaaatgacattacgaacctgttccaactgtcggaattccattccgaccccaatagcctattttccactgccaaccggaaatcgccaagaactaactttcgccaattcaagcctaattctataccagggatcacaaaaatattccgaacacactcctaaatcccaaatcacctaaaaatctatctgagccataaaatccacattctgaggtcatttaccaataagtcaactctgagttgacttttccaactctaagactacttttagaggctaagtgactcaattccctctataaccattccgaacccgagctaaccaaatctaactcatcatgagtagtataaccaagatataacaaggcagaagcagtgaaaataaaagcatgttctatgtaacgaccggtcgggtcgttacactcgagcaacgggcaatgagagattaatagtcgtttatataatttcatacattaaggccatacatatcggaaaccatataagtcctttagctaatatgattgtagtagtcatatgacctataataattatatcattgcgattcatagtaatataatagccatttttatatattttcatacattaaggccatacgtattggccaatggcaaccatacaagtccattcactaatatggttgtagtagtcatatgatctatgataattacatcattgcgattcatagtaatataatagccgtttatataatttcatacattaaggccatacgtatcgccggcaaccatacaagtccatcgactaaggttgttgtagtcaaatgacctatgataactacatcgttgcgattcatagtgatataatagtcgtttatataatttcatacattaaggtcatacgtaacggcaaccatataagtccattcactaatatggttgtagtagttatatgacctatgataattacatcgttgcgattcatagtcatataatagttgtttatataatttcatacattaaggcaatatgtatcggcaaccatataagtccattcactagtatggttgtagtagtcatatgacatataataattacattgttgcgatttatagtaatataatagccgtttatataatttcataatggcaaccatacaagtccattcactaatatggttgcagtagtcatatgacctatgataattacatcgttgcgattcatagtaatataatagtcgtttatataacttcatacattaaggccatacgtataggcaaccatataagtccattcactaatatggttgtagtcatataacctatgctaaatatatcgttgtgattcatagtattatcgaccgcttgtataatagtcgtctatattatttcattcattaaggtcgcatgtatgaccttatttatataatagtaagtatatatatatatatatatatatatatatatatatatatatatatatatatatattggttaatcttaattataataaaaggaaaatcatgataataaaaggaaaattatatattttgtattctagcttttttattaggaggaaaaacaagatgacatttttggactcaaatgttaaatacaattttcgaagggaaacaaagtgaaaggtaaaaatacatcgtgtggagggaaattgaaagtttttactctttatttatctcttaagcacaagaacaacatctccaactctctaagcaaaatagatactttaaacatgaatgtgaacggatggatcgaagaagaattctatccatggtttcggatgaaagtgctcagatcgtacattaagtgtgattatctggtaattttatttttgttaaattttcatgatttgttaactattgattatcccaactagcaatgaatcctaaaccctgtctttacactatgttcttgcagtttcttccaaagagtatttgtggctatcttactcctatttcgattaacacaacgcttcgatgtaatgggaaggagtgggctgtgactctcacaagtggtgttcggagaagaatcgtcaatgggtggaaacaatttggtgtcgacaataatctgaagaaagggaatgttgttctctttgaactagttcaagctacatcaggggctgtgatcttctctgttgaagagttaggattaactaatgcttagcttgataatttcttctctttagttatatgtaatgaattcaaatggatcaaagtaatacattaatatgattgttctttataatatcatttgtcttttttccatttattattgttatatttatttattttaagaagactaaacctaaatctaaacctaaacctaaacctaatcctaaacgaacctaaacctaaacctaaataaggataaaataatctttacatggattactctagtcttctaaggttaagactatgagataaatcctataaagtacactgctactatatggcagaagtttaaaaaaaattcaaaatctgtgaattgcatgccactatatggcagaagttttttttttttttttaaaaaatgtatataagcggatggataaagacaagctcctataattaattgtagtaatgtatgagagtaatggttgcatggaagagtgtaatggtgcatagagtagtgaaatcgactacttggggaagtgtaatggttgcatgaaggattgaaaaaggctactgcgaagtgtaatggatgcatggaggagtggaatgggttgctatgatgtttaatgtccgcactgggaactgtaatggttgcatagggtctctacaaatagactaagtcctaccggaaagtggagtagctattataattgagagattataattctccctatatatttcgaaaaatatgccagacctgtataacccaatcaaactgaaactactacaacatctaagcataacgatggataggactccgaccaagaaagttgttgaacaaccactccatggttccctcgttagtcataatattttataccaagatcttaagtgtgactatcctaagctgaagcgtgaggttaatgaattgattgagagggtggttcgtgattcaagcattgattacctaaaaggtgtgatgttggaagagcatcctctaacttctctctatactatgcttgacgatatgcccacaccatccgtccagaatggagctaagagaaattctgtcattgttatcactagtgaaatcgaatatgcctccaagacctcgaagtctctttccgtgaaccagaatattgagtagtccatgcattatgaaggtttatctcaagttatcttttttgcttagtttgctctttgtctaccccttatggtgatgtttatatttaacttgttatgatttggtgatgttatcatgaaatatcatattaatgaatgaaattattatgttgtgaatctttttctttttatcttaatgatcgtttgattcaagttaacaaaacagtcttattgtcttcaatatttcaattgttcgtttgatgcctagtgaaatgaaagtactaatagtaacatttgtaaagattaattaagtcctttaaaattgaacaatttcttttacaaattaatatagcacattaaagtcaatagtaacatttcaaattcaatatctcaacagttcgtttgatgcctagtgaaatgaaagtactaatagtaacatttgtaaagattaattaagtcatttaaaattggtcaatttgttttcagaattaatatagcatattgaacttatgacaccaaccttgaacaataggaaaatgtattgacgataaatacgaagatagttgagtacttgaagatgcaaaatataaaaaatactgaacttatgaagttagttgatgagtacttgaagatatatagttgagtacttatgaatcaaagtagtacggacaaattaaagttcaattcataattgttttttttgggataatacataattacctcattggggttgtacctaaatttcagttgcaccccttaaaaatacgggtgtcctatgacccccctggattcgttcaaaatgtaactttgacctccttacacgaaaaagctcactctaaaattagtaggtgatagacacgcgcagacacataataaattactaacgaaataaataaaaatgttactttttatatcaacccccccccccccccccacccaacccaaagaagagttgccccctcccacacacgtaccaaattccttttcatcttcctcaattagattcctttttcttctttttccaaacccagctcataacccatcaaatttaatgctttcattttcttttctttccattagtagtgatgccttcttctccattcttcttatataattttttttcacttcttttcatgtccatctttcttactccagtcgccggagaaaatgaccaacaaaaaaatgtggttggagaagatgatcggaaaattggatagctactcagaatccatgaattcttcctctttcttctttctttttcactacttttttcacccttttccctccttttttcctccactattttagggtaagaacagtgacagtcgccggagaagaggaccggagagagacggttcggtcatctgagagttcaccggcagctcatagccgagttttttcttcatcccactaaatctcttaatattaaatcttaggaaatggcaaattcaattccacaagaaaggttcaccaaaaaataattctggcggtcttgttagtccttcactgctggtaacagtataggagagaagaaaaggaaaggaagaaggaaaaagataaaaacaagactaaaatattaatattttatgaaagaattgctaataaaaataaattttaataaattttttgcctctcgctctcttcaagagagtgatttacactttctacgccacatcagctcaaaaggttatacttattacacgtttaacaaggccaagggggtcataggacacccgtatatttaaggggtgcaactggaatttaggtacaatcccaatggggtaattatgtattatccttttttttttagatgaacaattttgaaatcttcatccctacaaacattccagctaacaacacagatgacatagcactttctccattatcaccttcaaccccaacatcactttcaccaacaaaagaacttgaagattgttcttcactggcaacattttctttttggaactcagtgaatgctactactgctccatcataagatttgtaacacttgaagatgcttcctttgaaacctataaccataggatcacactcacaccaatagttgtataaatcgggctttttaccacgaaataccacatacaccttcgacgatgccgatatattatcagcttgagatccatttctaaactcgttgaacgttgctatggcttcattatacgttttgaaggccttgaagatgttgcccttgacaccaataaccataggagcacattgatgccaagagttgtacaatctaggcctcttaccacgaaacactacataaacttttgaaacattattcctcttccagtggtccatttcttaatctaacaataagaaaatataagagatgaagaaggagaaaacaaattaaagatagaaatgtcaatgagggcagtaaaagcttcttagttgtagcactctatatttaagtgttagggttagaaagtatatagtattattttagtttagtgatacagtaatatagaaatgaaaaatacagtagtttaatcgtatttttttagtatactatgcgtgtattttagtgtattttgtttaattggtatagtacatgtatatgagtataaattgctttatcaaaaatagtgtagcatgcatgtgtaaatgtgaaagaagcatgagtaaggtaagatcattaaactaatgagagagaactagagggaaaacaataaaaaatactaaagggtatatctagtggtatcagagcaagtttcattgtttcctgatttgcatcttctgttaatgttttttttttttttaattgtaagatttctagtgcaatttgcttctgcgctattatagctaaagaaaagaaaacgaaacattgttgtaaccaactgttgggagtgttgtttttttcaagtctctatgtttaattttttattttttttgctttttgggtataaaaaggatttttgaggaatcctatttgatataaagttttttcgatttacagcatataatgatgcgacattatatttcttaaccagatgaaaattttgatatattgtgttgtaatatttttaatatcatcaagttaccaaaattgtgttggaaatgtcggcgttgaacatatatgatgtgaaatacagtgtagctggtagtttgaccatacttttatgtaacgttattgatgttatagttatattacatctcgtgtttttataacaatccaaccgactagcgatattgcctgctctaagcataagtgcgcatgtttctataacatgttattacggtgtaagattaattttattttatatatatatatatatatatatatatatatatatatatatatatatatatatatatatatatatatatatatatatatatatatatatatatatatatatatatatgcatctcttccttgttttaccgatgtagaacttgcctggatattatatacaatcctcttagaaactacgtgtcttccgccattatttcaaagatataggattcgcttatactcagttgtgagttgtgatttgtcctaccacgcagagacagatgtagtgcattgcggacgaatttaatcgaactcataactttcgacgcggaacaaatctatatatcaaaatttactaaaattgcaaaaatataaactaataactttaaacatataacggggtcaatattaaaaaattcaaaagttaaacacataaaatttaaattttgaattcgcctttgctgccacgaatctttatattgagagacttggctaaactaaattgaacattgaggttttccccataatagccctactactactaaatcagaaagaatatacatagattacgcgaggtcttttagtatttaaccattttattccatggattttgattgttcaaaaaagtaattacgcgaggaggtttttcttaaacggatttctgcgtatctttaacgtatttggagagtagtcgcgcaagctgtttttcataaattgaaagaaaaaaaaaatctagaaacaattttaaaaataaattagtgccctataaaagtattttcttgaaaaatatttttaccccaaaatacttttcagaattttttttgaataaaacacctgcagaagaattgtagaaatttacagaaaaatgaagaaattatttacaacaaagagaaaaggttcagaagtaggctagacaataaagtagctagacaattgccaaacaaaaaagggggaacgatttccaagttaaataaacaggattatgtttaaaatgcacacatagttatacatattaaatagcaaacaacaatataaataatttataaatttagaaaaaacggttgaacatcgaatatcgaccactcaaacttcaaatgagaacaacttattttcttatactattttgttcaagagatacaaaaaaaaaaaaaattgtttctcaccctgtgtctggtacctctattggagcccgattatattcggatttgcaccgtgtagcccaatttaggaggaagctcttcctaccaaagattttcccatacccaaaactcaaacccgaaacttctggttaagggaagagcatctgttgcaccacatccgttggtggttaaatattttttctttttccaaacttgggaaggagtagtagttagaaaaagaaggcaaatgttatggcacgccacatcatcatgccatgtaggtgtctcttagcatatatttttgccatatggaaagctacataggaaagaggctagaacttgtaagaaagttctagaaaaatagaggttttcttaggaagaccttagaaccctatgaatttgttagggaagttcttagaagattctagctatgtagagaattctagatggtggtcttacttgtaaataataaggagcttgtgtaacaattaatatttacacactagcccctacgagactagtatataaaggggccattcatttgtaaattcaccaagcaaaacaatcaaattctctcttatacaaaggctttctttggtgattctcttgtgttctaacattctcttagtgatcctgagtatggtaagtctgacttggcatagcaagaacgtgagcaagttgtgcaagatagtgagcgagttgtcaagtgccgcacgtgtacttagttaaataattcaaatgttagttttttaacttaggggtcgtttggtatgatggttaagcaaaaataatcctgggataaaaacttagtacctttttatcgcttgtttggttactaatcgtgggataaataataccgtaaacttatacgtgtcggatggtggaatagtaatctcaaataagttgtcccgtgataaaggagtaaaattgacaatctcaggattaacacaacatatctaacaacaacaacaatatatccagtattatcccacatcatggggtctgggaagggtaatgtgtacacagaccttacccctaccttgtgaaggtagaaaggttgtttcaaatagaccctcggctcagaaaaacataagcaacaaattaattaaaaagatagataatgagggacaacaccaaaaaaacatgtaaaagtagcatagaaacaacacgataataagatgatcaaaatgaaagaaatgacgggtattcataaaaatctactaccaacagaatgcaagagcgcgtactaatcctattggtgtgaacaatctaccacctaccttactaccctaatcctagacctccacaccttcttatcaagggtcatgtcctcggtcagctgaagttgcacatgtcttgcccaatcatctcaacccacttcttcttcggcctacctctaccttttcgtaggccctccaatgtcaacctcttacacctcctcaccggggaatctgtgctcctcctcctcacatgtccaaaccacctaagcctcacttcctacatcttgtccttaatggaggccacacccaccttgttgcgaataacctcattcctaattctttctaacttggtgttgtcgcacatccatctcaatatcctcatctttgttaccttcatcttctttatattggtaatcttgacaaactgaaactcaaccccatataacatagtcggtctgactgccactccgtagaacttacctttaagtttttgtggcgccttcttgtcttacaaaacaccataagcgagtctccatttcatcatccttccccaatacgatgtgtggcatattcatcaatctccacatcccttgaatagtatacacaagttgcttaaaactacatcccctagggatgacttgcaagtccagccttacctcctcttcccctccctgagtctcaccgctgaatttacactccaagtattctgtttttgtccaacttagcttgaaacatttagactccaggattttcctccatacctctaacctcgcattcacactgcctcgtgtctcgtcaatcaatacagtatcatcttcaaataacatgcaccactgcacctctccttggatgtggcgcgtcagaacgtctatcatcaaggcaaacaaaaaaaggcggagtgccgacccctggtgcaaccctcatcatgaccgaaaatggtctgagtactctcatacttctttgctccatcatacatatctttaatcatcctaatgtaggcaacaggtacatatctagcctccaaaaacctccacaaaacctctttcgtgaccttatcgtacgccttttcaaagtcaatgaacacaatatgcaagtctctttttgtaacgacacggtctgttgttacgtacaatatacattataattactgttattgacttgtcataggttggttaaactgttattgatgtgttagagttggtagtcttgaaatcgaaatggttgtagtgagagtttagccacttagtctttaaaaataaccttaaaataggaaaaagccaactgagagttgacttattcgtaaacgacctcggaatgtggattttatggctcggatagcttcgttaggggatttgggacttaggagtgtgttcggaatatttttgtgatatccggtgtagaattaggcttgaattggcaaaagttagtttttggcgatttccagtcggcagtggaaaataggcaatcggggtcggaatggacttccgacagttggagcaggtttgtaatatcattttgggtatgtctggaaaatttcaggtcaatcggagttgttttggatagtttcggcatcgttggtggattttagaaatttcaaagttcttaggcttgaatccgttgtgattttggtgttttgatgttagttttggtgttacggaggtgaaactaagtttgaatgaagaattagggttagttggtaggtttggttgaggtcccagggacctcgggtgtagttcggatgctcaacgggttagatttggacttaggaatgcatcagatttttgttgttctggtttcctcttgtgcgttcgcgttggtgtagtcgcgaacacataggcataataggcttcaggtgttttattgcttcgcgttcgcggatggcagagtgcatttgcataggtttgccagtcgctgcatcgcgaacgcagggacctgatcgcgttcgcataggcttgagctggggtcctaggggttttgggtcgttacccttcgcgttcgcaggtctgggaccgcgttcgcagagggttaggacgttgaggttcgccatcgcaatccccaaccgcgttcgcataggccattttctgggcgcgtgttctttactcttcgcgattgaccttccgcgaacgcataggtcaatacctgggcacactctttaagacccaaaaacgagggttaaagcctattttcaccgtttttgattttggagagcttggagacgattttgaagagggaaaattagtgttcttcatagaggtaagtattttggaccctaaaacttgattataggtgattaaggaacataatctcagtatttaattcatgaaaatcagtagaaaagggggagttagggcttgagattatgagacctttaagggtcaatttgaggggtcaaatgaactccgattttcgcgttctttatatgtacggactcgtgagatgacgaagaacattttgatataaaaagttttgagttccgagatgcgagctcgggggtcgggttttagcaaatttcggattttgagctaaaattggtatttttcaattggaattcattctttaagcataatttgatgataaaaatctgaacttggtaaatttggagcgctcgaaagtcgattctagaggcaaggggttgcagagtagcttttcgggctagcttgaggtaagtaatgtctttaaatcccgtcctgacggtatgaaaccctagactttacaccctttcacgggttttggaatacaaagattgaaactttgggaatatattccctagttaggcaactattgagttgcgaaactgatttttaagcctatgcttaatagtattgttatattttgatatgattgggcggtaagccatgtttggggcctagtgccgatctgtttacccctttggagctgtttttactattttcctcacttgatatgttatgattttcactcagtcttttcttgataattgttttgacactcagagtattttgatactatttattgaaaatgaaacattatttttgggtcgagaacccgatatatttatggcctgaagggcaagttgagagtgtctgactgagtgaggttgcgggcctatattgtgaggatgttatgatatgagtgaggttgcgggcctatattgtgagtgatttatgccatgatgtggcttgttatagcgcttgggttgtggagccccttcggagtctgtacacacccctagtgagcgcaggtacctaatgagtgatgctcaaggggcttatgctgagtgattgtgaggatgcctgatgggctgatactgagtgattgcgaggatgcctgatgggctgatacggagtgactgtgaggatgcctgatgggctgatactgagtgactgtgaggatgcctgatgggatgatattgagtgatggtgaggatgtctgatgggcaatggttatgagaaatgattttggcccgatgagcagatttatgatgattttactgagtttttgaactatgatttacttcgtttttcaaactgatttttactgaaaattttactaagacatacggatattatacttgtttcaaggtatttctggaaactggttttgtacttatgtatttgatgaatactacttggtgacttggtgttttactggcttttgtgaattggtgtatctatattgtgtgttttataattctcaaattgtgatttattttcattactactgagttggtgtactcataattactcccggcacctctgtgtgcagatctaggtatgatttggagcagtagtcgtctgagttcgttatccgcagctagtggcgaagccacatggggttaagggtggtcaactgaccacccttcattgaaaaagtgcaatgtgtacgtaggcaaaatattacgttttagaggtacataacacatattgaaccccctttgtcgggaaaaaaattcacttcttttaaatttgaacactcttgaaaaaaattctagcttcgtcactgtccgcagcttacgggatttcgaggtagctgtccagcgtccgcatcttctccgtttcccttccttatttagtattaatatattatttctagactttgtctatgtaaatagcagagttagtttatttcgtagatgctcatgacatgttgactccgggtcttggggacggttgtagactgttagcttgattgttttgtttaaatatttcgaaatttatatgcgtgttatgaattgctgaaaataaattgagatatttgagaagaaaaatgtgaaaattctgagtgttggctaacctatttccacgataggcgctatcacgatcggttgggatttggggtcgtgacaagttggtatcagagcactaggttacataggactcaacggtcatgagcaggtttagtagagtcttgcggatcggtacggagacgtctgtacttatcttcgagaggctgcagaacccttaggaaacattccacactcttgaattcttatcatgcgaatccatttattcagccaaaagcgtaactctttgaattcctttcatgtattcgaatgagcacgcgagcgcttggtatcagttgtgcgtcggcgacttgtgacttccatgggtgagatgtgatttttaacatttaataatgggctagtcggaaggacttgaggccggattttgtctgtggcttgagtgttgagatttcatttgggtaagcacatgcgttgggggacttatatgtccatttgtgtccttattgatggaactttgtgactagatgactatatagtgagtgtgatcggatagttatatgtattcaggttgtttgattgtgaccaaaatgaattggcgggagatatggcaagaaccattgattattggacttctgtattgagttagaatatggctttgagttatgagtattgaaggacctctcgtgtagtttagttgtggagtgtagtgggttttcctgttatgttctgagttcctgtgatgtcttttaagctgaccaatgctccagtagcattcatgtatttgattagtggtgtattcaggcagtgattgcactcctttgttattgtatttattgatggcatcatgtcgtactcacgtagccagggatagcatactcgacatttgatgatggtatcacaaggatatagggaggagaagccttgtgcgaagttctccaagtgtgaattttttgctcagttcagtagcattcttgggacacgtggtgtccagtgaaggtggaaatgtggtcagacgagtgtgactagagcttccagaagctcaagattctttgaccacagccccagtgttagtattgtcatcaacttcaggtttttatactacttattgtgatgtctcgagggcaggcattagttgtgttctgatgtaggagggtaaagtggttgagtaatagctatgatcttcggaagtgtatagatagatatcagttgatgctaagcatgcaggggtatctcctgcgggttgtcccgaggtctgtggtccttatgttgatctgtagtaagtttctaccagtaaatgatgtatgttgtaatttgagtttagatcacttgtggaagttggcatgaccatttcaatggtggatgcgagatttgtatttgatttgagagttagatggtttgggtcatataagcttttggaggatttagttgaacctcaccacaatatggtggcagtgataatgtgtgggcattgtaagttattgtttgtcttgatccttggctttaagccaagcgggggagtccgttaatgataagttgattacacgattatgtgttgtactggtttcggtgcgaagtatattggtgaatcagttatgacctacagaggtggagtctaggaatgactcgggtgatggaaatttcttcgatccaagttttaatatactttacggatagtggaattcattgaatgatggagttgcactggtaagggtagagcgtgcaatgtatgagtgtgtttgttgcttcaatgtgtggattactttcctagtatgtggattgcaagcggggtcaggtcgctctgtttacttggttattgtaattgaaattgcgtagagtaaatgacgttcgagaatggttcagacggattcaaggttatatgtagcgatcgaggatcttcaaggcgtgagaagggctagaactgagatttacgaggaatgtgtcaaggcttgtggtgtatttgtgttatcatggattctatccatcagtatcaggaaagtgaaggtaatgactttaaaattcgcaggaagtctctgcagggtaagtatttctaatctggtgcatttggggataattgagggagtattcagcagcttatgagtcttaaacagtatatttttatgctcgggtttcgtacggtgagtcgggattgagaattgcgattttatggcagaagaagtatcagctcgaaggtaagtcagaaggaaattggataaataggacaacttggtagtacgtcagatcggtgtgataagggatatggttagttctttgggtgtttataaggtaatgagttgttacatgtgtttcttagcaattctcttggaacttggtggcatgcgtagcttggttgagttagaaggattcagtcctgacgggttggtgttgtacaaatgtgattcgggagttcttgatgatttctaccacggttggagatgtatatttctactggcgtgagggtcatgtgatgtatagtgattttgcttctaaatgggatcaatggaaagttcttggctagttgggtacgtagttgtttgtggctagaaagggatcatgaagttctcatatttatcataggattgcatggtgtatgcggtattttgtgtataatggagagtggcatatgtgaggtcacggttcagttctcaaaggaaggtcagaactggcagtttcggatgattaggtaaaggataccgttattgggtggctggatgagagtacacattcataaaggacaatgcgtttaaggcaatgtggttgagtaagggtgcatcattggtgttacggcgctctcttgttggaccgactgtcgatattcaagtttgttggtggcacagaagaattataggagtatccccgtggaatgattgagtattagagacatgttatatattcgagtggtggaattgggatcagatatagtaattggtgcgcctcatggatttttgagactgagagttttcatgaacattgtagttgtgaactacgaggatgcgagcaaagctagtcaagtgttattatatgtcatgattcagtcgttatgaacgttcggagagttatctacctgttgtgggtgaccagaatttacttagagttattggtaggccagtatgggtgttgcaggattgagacgtattgcttatgttctttttggttcgggtggcttggtatcgtctaatttccccgtggttatggtaatgcactttgagtaattgatgccggatttcgcatggttatggattttgagcaggatggcttggagtatttcatgtggtctagaagttggatgggatcacgctttgtagcagagttaagtagagggatgatccttggtgtaggaattgtgtgatatggtttcacgatgtgtatcaggcttttagcatgatgtggtaatggcaagagtaatggtaggatagtcctctcgtgggagtcttctctattttatgaattgagatcttaggatgttgttattgagtgcacgagttgcacaagttatggctctggatggtattgatgttgatcgagcgaatggttgctggttactacgtgtttcttttatcatcggcaccatatgaaggtgttaaagcaaggttttgtttgataagaggttatttaccggtattgggttgttatgagcagcgattgggattaggagtcaatgttataagtgttgagtcatgcggtatattatgtgatttcatcttgtgttgcggatatgtcttgatacagcgtgttcagactatttcagcttatagtcgtggaaatttgatcttgtgaatggactcagaagtggaaatttagttctaaggtttatgggtcaggatcggacttcgaaatttcaactgtgttgtgctattagacctatatggggtaaggtgacatggaatcacctctgaatatgtgcatggtaggttacacaacattttttgtggtgtttggaacaactctagaaacattagaggacgaacgtgtgtttaactgggagaatgtaacgaccttgtctgtcgttacgtagaatctgcattataattactgttattgacttgtcataggttggttatactgttatttatttgttagagttggtaggcttgaaatcgaaatggttgtagtgagagtttagccacttagtctttaaaaatagccttaaaatgggaaaaagtcaattgagagttgacttattggtaaacgacctcagaatgaaaattttatggctcggatagcttcgttaggtgatttgggacttaggagtgtgttcggaatatttttgtgatgtccggtgtagaattaggcttgaattggcgaaagttagtttttggcgatttccggtcggcagtggaaaataggctatcggggtcggaatgaaattacgatagttggagaaggttcgtaatgtcattttggatatgtctacaaaatttcagattaatcggagctgttttggatagtttcggcatcgttggtgtattttagaaatttcaaagttcttaggcttgaatccggtgtgattttggtgttttgatgttagttttggtgttcacgggggtgaaactaagtttgaatgaagaattatggttagttggtaggtttggttgaggtcccgggggcctcgggtgtagttcggatgctcaacgggtaagatttggacttaggaatgcatcagatttttgttgttttggtttcctcttgtgcgttcgcgtgggtgtagtcgcgaacgcataggcataataggcttcaggggttttagtgcttcgcgttcgcggatggcagagtgcgttcgcataggtcgcgttcgcataggcttgagctggggtcccaggggttttgggtcgttaccctttgcgttcgcaggtctgggaccgcgttctcagagggttaggacgttgaggttcgcgatcgcaggccccaaccgcgttcgcataggtcaatttctgggcgcgcgttctttactcttcgcgttcgcgattgaccttccgcgaacgcataggtcaatacctgggcaaactctttaagacccaaaaacgaaggttaaagcctattttcaccattttttattttggagagcttggagacgattttaaagagggaaaatcagtgttcttcatagaggtaagtattttggaccttaaaacttgattataggtgattaaggaacataatctcagtgtttaattcatgaaaatcagtagaaaaaagagagttagggcttgagattatgagacctttaagggtcgatttgaggggtcaaacgaacttcgattttcgcgttctttatatgtatggactcgtgcgatgacgaagaaaattttggtataaaaatttttgaattccgagacgcgagctcgggggtcgggttttagcaaatttcggattttgagctaaaattggtatttttcaattggaattcattccttaagcataatttgatgataaaaatctgaacttggtagatttggagcaatcggaagtcgattctagaggcaagcgggttgtagagtagcttttcgagctagcttgaggtaagtaatgtctttaaatcccgtcatgagggtatgaaaccctggactttacaccctttcacgggttttggaatacaaagattgaaactttgaaaatatattccctatttaggcaactattgagttacgaaactgatttttaagcctatgtttaatagtattgttatattttgatatgatttgggtggtaagccgtgtttggggcctagtgccgatctgcttaccccttggggttgtttttacttttttcctcacttgatatgttatgattttcactcggtctttcttgataattgttttgacattcggagtattttgatactatttattgaaaatgaaacactatttttgggccgagaacccggtatatttatggcctgaaaggcaagttgagagtgtctgactgagtgaggctgcgggcctatattgtgagtgatttatgccatgatgtggcttgttatagcgcttgggctgtaggagaccttttggagtctgtacacacccccagtgagcgcaggtacctaatgagtgatgcccgcggggcttatgctgagtgattgcgaggatgcctgatgggttgatactgagtgattgcgaggatacctgatgagctgatacggagtgactgtgaggatgtttgatgggctgatactgagtgactgtgaggatgtctgatgggctgatattgagtgatggtgaggatgcctgatgtgcaatggttacgagaaatgattttgacccgatgggtagatttatgatgattttactgagtttttgaactatgatttacttcatttttcaaactgatttttactgagaattttactgagacatactgatattatacttgtttcaaggtatttctggaaactggttttgaacttatgtatttgatgaatactacttggtgacgtggtgtttactggcttttgtgaattggtgaatctgtactgtgtgttttataattcttagactgtgatttattttcattactactgagttgtgtactcatcattactccctacacctctatgtgcagatctaggtattgattcggagcagtagtcgtctgagttcgttatccgcagccagtggcaaagccacatggggtcaagggtggtcaactgaccatccttcgttgaaaaagtgcactgtgtacataggtaaaatattacgttttagaggtatataacacatattgaaccccctttgtcggaaaaaaaattcatttcttttaaatttgaacactcttaaaacaatttctagcttcgtcattgtccgcagcttacggtatttcgaggtagctgtctagtgtccgcagcttctccatttcccttccttatttagtattaatatattatttctagactttgtctatgacaatagcagagttagtttatttcgtagatgctcatgacatgttgacaccgggtcttggggacggttgtagactgttagcttgattgttttgtttaaagatttcgaaatttatatgtgtgttatgaattgctgaaaataaattgagatatttgagaagaaaaatgtgaaaattctgagtgttggctagcctagttccacgatatgcgccataatgaccggttgggatttggggtcgtgacacttttcatctccctatactgctccatcaaactcctaacaagatgaatgacctctgtagtcgaacgccccggcataaacccgaatttaatctcagaaatagacacactcctcctcacccttagctccaccaccttctcccagactttcatagtatggctaagcagcttgataccccggtagttattgaattttggatatcactcttgctcttgtataaaagaaccatcgtgctccacctccactccctgggcttcttgttcgttctaaaaatgacattaaagaacctagtgaatcactccaagcctgtcttgcccgcactctaccaaaactccacagggatttcctccggcgcggtcgctttgcccctgctcaccttatgcatagtcccctccacttcatcaactctaatccgcctacaatacccaaagtcacaacaattcccagagagttccaaatcacctagtacaatgttcttgtccctctcctcgttcaagagactatgaaagtaggtttgtcgtatccgacggataagcccctcatccaacaaaactctaccttattcgtccttgatgcacttcacttgtccaagtcacgggccttcctttctcttatgttggttaacctgaacaaactcttatctaacagtcaataaaaaaataatctcaaaataactaatcttagtacaattaattccagcataattaatctatttataactcgtcttcaaagttgaaaccaaattacctattagagttaactttggatcaaacctgtagtatgatcatgagaaaaaaaggaatttataattttttatataaggagaaaataattaccttcaaatagttcttataacacaatgccaaatctaactaaccgttgaattttgactagacattaacactttatgattagagtgtgattattttcttgataagttcgagaaatacttatgagtcatttggtacgaggtataagaaggtataagggtggtataaaaatttaatatcatcttaatattctgtttagttagcaaatcaggtataagttatcctggtgttaattttaacactgggataacttatacttcatagaaggtgggtaattaacaccggtataacttataccttcttcttagaaattatgcaatagtcattcttaatacaacatatcaaacaatgaataaacaacaatctcaacataattaatcccaacataacttattccaatataacttataccggtataaatcatattccaatcaaatgaccccttagaatacaagtaagataatgtgcttgtccgaaactaatatttaactggtctaaagctaaatggtccaattagtttgaattcgtattaaagggaaaatcgctcttattagggatttcttcataaataataattacgaatatattaaaaattcaaaaattaacagaatttaatatatttgcatgtctctaatttattacttcaaaagtttccattttgtattttatattaatttaatatatgcattcgagtgtattataaacatttgtttgttcaattcaatcgcacttacattgtaaatccatttaagttgtagatgcttatattttatctaactcaatcggcttattatgtttgagtcaacttagcctccgctcaaattgacacctaaacatagagttgttcatattagacctttcaattatatttgtgccaattagacactttgtagtgacatgattgagtgtgtggagatcgaaggacgcgtgaacatgagaaaaaggttgttgattattattatattagtttttgaacacgtccgttgtacgtgtgtgccatgtcaattagtacaaactttacaatcggtattgatagtattaaaattgtagcataatctatatactatattaaaagcacgaatgcccttagcgaaatgtcgtttaccttttttaccgcttaaaagtaattttctcattggacaaaattgtaattaaattatttttctaatattgactttgcttaagtaaatgtttttcttatttacttcataaataatttgttttcgttaggtttcctacgtctatagttattttttatttgttttatattagtttaggtttaggtttatataaaggttgtagattcccatttaaattctaccgttaaatctaaagaattatgtataaaaaatataaacgcacaacctaatatcaaattctagataaactttcaaaaagacaatcgataattgtatttcaaatatacattatttagtaatgtttatataatattaaaaaaaaataacatagagtacataaatgtgttaccataagaagagcattggaataaatgaaatcagaaaatatagcaaattggtaatagagtcaaatttataaaaacaaatttgaagcaataaggattaaatattagaagaaaaaatatattctaaatgtgttgtcattaattatttttctctctttgcattcaattccaacaaatgataatttcttatatttacaataaattaagttatttattgtaaaatattaacttaattttagtcatttttaaactttattatcaattttttataggagctataaggcctaccccttcatttttaaatctctaaaacccagaaagaattaagaaaaattgtgttatttggcataataacatatctaagtacttctatgaatatattttattagttgagctagctacgcgagattaacattcatcattttaaggaacttatacttctttaattatatgatttttaaatttgcgtattcaataatatagggtacacgcgcaagcgcgtaccataggctagtgaataatataaagttgaaggggtaagttacgttctcaaagtgatgaacaatcaacttatttgaccgacttaattacggaagaatgattaggtatatggatttgacttttctcatttggcatgtttgatctctttacacgacacttgtaagctacaccaacttaggtcttagacgaggaatacagagaatggcgtgaaatttcagtgaaatcgaaataaaaagaagtgagatgaagccgaacgaaggaaatttccagcgggctttttagggcattaagtcgcaagagctgaaggtcaggtttttcattttctgaaaatgagtttcaatttgttttggggttaattctataagttgaaatattttatggtgttagaggcaattgtagtacacgcgtttaatttttaaaaaactatttctcatatagtctacaaagtgtctaattggcacagatgtggtatagttgaagggcctaatagaaacaattctatattttagtgtccaagtgacaaaaaaagaccaagtttaacggttcagttatgtattctgccttggaaaaatgacattgtattgccgctgtaaaaataatagcagaaaaaatatataaaatttgtatattttttatatattatacacatgttgtatattatatacaaaaattatatgaattttatatactttttcgactaccaaatctagacataaataattcatggtgcgcgctaaaagaaataataccctgcttaggtacgaactcactcagctagggctcgatttagactcagcttgcgagactcaatgccaatgcgctcggcctcagataatatgggcccatttggccataataaatcacttttttcccgaaaaagaccataaaattttcaatttttaccttgaacatgaattttaaagttttcaaaattttgaaaaaacttgaacatgaatttcaaagttatcaaaattttgaaaaactccaaagacctatttttcaaaaattcacctcacgaaaattcaaaaacaacccaaaattatattcatatccaaatacaactctaattttcaaaagccattttcacataaaacaacattcattttttttagaattttgcaattcttatgtccaaaagccactatagctagctcgattgagctcaactcagtaccatagaaaactcaaattggtctctcaatgtagatgttacctttttcaaagtcctaaaagagaactaactggattggaatttcatcataagttggcagatataactatccaggaagtaacataggatttcaacataaataattaaagtgggcacaggcacagcagatcaaagtccacagggaataagattgaaagacaactcgggagaattgttactcagattcaacatcatcaaaactttctttcaaaatgatcaatgaagttgccacaactcatctataagccatttttcacaatacaatgggcaactttccgctaagactcggaccagcgtccaatctaacaccggctctcactggtcgccaggcaaactcttaataatatcagaatcacctgtaatccagaaaagtaaacgggtaacgcgtatgaaaccaacaagacaatattatatgtaacagcaacacgaaatttgctatgtgcctacctgggtcgataatgctgaggcaacagaccctgaagtatttaccacatgcagtccccaaatctacgttgtctgaaacaagcataagaacaataactctattaagaaactaaagcccacacactgctcatccaatgatctccaatcacaattacaacgaacaagaaggagctcaatgtttaattgattgagaaaaccaacatttccattatgcaggcatttcacaaccaaacatattatttgattttctagcaaaactataggaacaataaactaaaaattctgatttcttgaattcaaggtgaatagacaagattgcacattctatacatacaaggcaagagaaacacacaaacaaccagatatgcatctgagcatataaaccattctagaggaagtctacgccccggtttattcagacagaaaataaatgatatatacatatacacacacgaacacaaaaggaagcggatcacttcttcattaccataagttgcaattaatatcagtaaaagaccaggacaccatgcatgcacaccaaataagtagataactaaaagtatataaacaaggatatgaactcacttccgttgtagtgatgaactccaaccttcgccaacatagcatagtactctatctcggacttcctgataggaggacagttgttggcaatgataacaagttttgctgtaatacaaaaagcaaaatgcagataccctggttaaactccaaccaagataaatttctccaacaatagaaatccacaatcaggaagtttatgccccccttacatagaaaaacagccctgttaatctcccaaaaattgtgtttttagtattcacatgttaaaaaaaaaagatgaattttaaattgcaaggtgatattgccaagaaaaagataaatactatgattaaagtaagttactcaattaatcaaattaaataggcacaaacagaacaaactgaacacaaattcgtacaactaagcccacttacattgggatttaattgatatattgatccatacaaacgccaaatagcaataatcctcacaagccaatccttttttattttacattcaataatatatggcctgtgttaaaatgaaagaaatggatatctgattgtccatttcaagataacaaggcatttaaatgtttggagcattatgagaagaagcaagcgagtggctttctgatcttcactcgaagctccaaccttacaagccaatctatagtcacaaatttcattttatccttaaacattatactcgtaaacttgaagcggagtatcactacccattcggacatttgccagcccacaaacaaaagtaatattacccatgataacaaagtactttcacccataataaattgcacatcaaattcataaatcatcataacttgactattgttatctggattaccaaactaccaattaggccataatttgactaaattttcttcccttcaacctacatatcataatttcgactagttttaactgactgtcaatctttaatgatagtagttgagttataatttaatttttcagtcaactggagtattaccattattattattagattttggtattataacttaactgctataatcttggtaatccttgtagtatcttgatagttttactatttatttattacgcaattcaatagcaataataatttgtaatgaaaagggagaaatataggaaaagtaatattttgctttgctataattttttccaaaaaaaaaaagaatagagacgggtgagtatattacatgtaagtatttattactacgcccttctcattttccaaaggccaaatagaaaagtgtgtgtgcaatgtacttggttctaaccaattagacagcacacacgctgatctatttggccttcgaaaaatgggaagggcggagtaatatttttgttgtgcagatcccagtacaggacccagtggacattgagctaggtggcttccttcagtccactcggagacactgaggtagtcctgcaggcgtccgcgggactccttcagaccgttatatgtactactcttagatagtccgtgagatgtgactccactatttctgatttttggtgcagattcgtaaagtattgtaatgagattcaattatattatgtcttgccttttaaatttatttcttgttaatctggtaaattacttgttcatggctaatagttaaggcttaatgaaattgaatattcacgttggcttgtctagcgggttcaatgttagagacgccatcacggtcccgatggtgggaatttcgggtcgtggcccttattcctttttttgaaaagaggtattactattcctatctttttcccctttccataacaaattattataactattgaactaactaataagtaaatattaaaactagatcaagatactatcaccaagattatagtagttgagttataataccaatatttaatagtaacagtgtactccaattgaatgaaaaattaaattataactcaactactataatatagagtaatcatatagccgaaacaatttgggattaaatcgtagatattactatatactcaattcgtagtgagttcagtacagacctttggagcttctaatggtcttgagaacagttttgtatcccaatgtatacttgccgctcttcataaccagagccagcctattgttaatactctcatgagtcttcttctgcaaaattcacaacaaactcttattcaatatttgattttaacttatatgcactgtcaacttttgtactcccaagaaatttacttctaaaataccttgttttacaccgtcagtgaatagaacttaaaactcatacagtatttacaacaaacagatggtgtgcattttttcatgatccgattcgtcaacaaatattgcttttaaagaagagattcttacggttttcttggcggcaaccatggtggattcttgtgtggaatcggagccggagaaaattagaagaagcaaatgcgtcgacggcggcgagcgaaccctgaaatgtggggagaagtttccaatatataaccgggcaaggctggtgtgtattctagggtttgggttttcggctgaagactgataagcccaaattctaagagctttcgttttctaagcccaaattgccataaaagtggtaaaatttgcgtgtggtagccactaataaaggtggtgtttattttttatccacaaattctaatgctgagcaaaaatagccaatactctattaaaaatattttgactgttttgccctttgtttacttcttatatgcgggaaaattgcgaggcaaactttacaactttttcagagactgttcgtgctcctcagactgttttaatcagtttgcagttgatcttttcctccgtcatcttctcttctttgtacgattgaactggtaattatcgaactcagttgcaagttttttatttgatttttttttcgcttttatgcattttttgtttttgtatatgtttaatcgagatcaatgatgtgtgtggcatgaagtatgtttgaaatttcgaaaataacgattataagttgattttagtgtcgaataaggatcggatttttagttatgtaaggatatttcatgaaaatagtcgtttgaattcataagttaactgtgtttatgaatttttagttaaatgtgttcataaaagttaaggaccaagtgttttttgcttttggagttcgatgtcaaagttaaggactgaaaactataagttaaggacctattgtccttaactttttaactttaaactttaagtcaaggactgaaaactataagttaaggacctattgttcttaactttttaacttgcaacttaaagttaaggaccgcttgtccttaactttttgagttgaaacttgaagttcaggaccaagtgtccttaacttttaaacttcaaaaccaaacttcaggacctagtgtccttaagttttcaacatgaaattcaaagttaaggaccaagtgtccttaagttttcaaacttcaagacttagtgtccttaacttttcaacttcaaattcaaacttcaggacctagtgtccttaacttttcaacttcaaattcaaacttcaggacaaaggacctattgtgcttaactttttaacttgaaactttaagttacggattgcttgtcctgaactttctaacttgaaagttgaagtttaggaccaagtgtccttaactttttaacttgaaacttgaagtttaggacctgctgtcctgaacttttagacttgaaacttgaagttaaggactgcttgtccttaacttttgaacttgaaacttgaagttcaggaccaagtgtcattaacttttaaacttgaaaattgaagttcaggacctaatgtccttaacttttaaactttaaacttaaagttaaggacctattgtccttaactatttaacttgaaactttaagttaaggactgctaatgttctttttccttctttgtagtgttataattgaaggagatcatttgttcgagtttaatgtttggcgaaaccagatgatctattggaaaggagatctacaatataaggaaacgataaaaagttttttgtcaaaccggcagtggaagaaattaagggatggtattttcgggaactttttcaggttacaaagtgtgaagttttctggtaaacttattcattgtctattactttctgaaattgtaagtaatgacactaattcgatgacgttcaaggtttttgaccatgaacttaagtttacacgggaagcatttaatataatcactggtttgaactgtttttctacaatggatattaaaagtttcgatgaaaaagagaataggcttttgaagtctatttccctggcaaggatcgtattgagttaggtgatttgcatgattttatttctagtcatccagatggtacaacttcgtcatttgaaggcagtgatgatgatgttgttaagttagcaaccatgtattttgttgaatctgttttgttgggtaagcggaagagtaggaacgtgtctgggaagttaatgaaaattgtagatgatgatctactatgctcttcattcaactggggcactctatgttatgaaacgttattaaaatcattgaagagttctttgaaacccaatgagaatgagaatgagaaagagaaagacaaagataaagacaaggatagctacactctacttatggaagtgttgccaattttacaagaaaaataatttgttaactttcgagaatgcggttatcctcggatgttatgttattcagacatgaaatctccacaatatgattttttgggtaaaagatacttccataatggaagtgtaagttaatctgattactcgtttttttttgtttatgttttttagttaaacttatgtgttctttttcttatataatagttgtatgaattgatcgagatggcaccatttattgcttgtgaagaaaatgtggagcttgttactgtgcatgagccattttctcaagatcaaagctcaatgccttcttccacacaatttgatgaagtcattcttaaggaaattgttaaagtagattttctgtcttttaatagcattaattttttatttgattgtttttgcttaagagactttatttttatggtttttgattcagagattatcagagtagtttaaaaaggatctgcaggctgaagttactagaataaatcagaagatatctgtggcaggaaaaaaaattgaaaatgatatgaaggtagtatcattaatttcagttagtttaaagttaaggacaccaattcaaagttaaggacatgttgtccttaactttttaacttggaattaaaagttaaggacatgttgtccttaactttttaacttggaattcaaagctaaggacctattgtccttaactttttaacttggaattcaaagttaaggacctatagtccttaaccttttagctttgaattcaaagttaaggactatatgtccttaactttttaacttggaattcaaacttaaggaccaagtgtcctcaacttttcaacttggaattcaaacttaagtaccaagtgtcatcaactttctgacttggaattaaaatttaaggacctattgtccttaactttttaacttggaattcaaagttaaggactatttgtccttaactttttaacttggaattcaaacttaaggaccaagcgtcctcaaatttttaacttggaattcaaatttaaggaccaagtgtccttaactttttaacttggaattcaaagttaaggatcaagtgtcctcaactttttaacttggaattaaaacttaaggaatatatgtccttaagtttctaatttagtttttttcacaggatttaaagagaagtctaggatcaaagattgatactttgttgaaaatttgtgtgaaagctgatgaacggaacatagagagagaatctagtgttccaattagtaaagatggagttgatgatcatgatgatggtacagaacctactgtgacaattaacaaatatgcaagtggtggtgaacgttatgatacagatgttccttctgcttgatttcttctttcataaaaccaacgttgtagcttcacttggatgaaatccatcattcttaatataggcagctcccttgcttctaagaggacagaattcattgactcaactatgtttgttgtgagcatgtcatatcttcgtcttggactacaagaacgtgcccacctttccggtggttcttccatcaagtagtcataagtcttcttgtctacttttgctatatttgacatgtaaagatcaaattctttgcgcatgtatactcttgcagcactttgaaaaagttttatgacctcacttttcactttccttcgctttagattctgctccaaatgatagatacaaatcccatggtggctttcaggatatacctttgcaatgacatatgcaatagcttgatgcctgtctgataaaaaaattaaattctcacggcttccaattgcattgcgaagctcactaaagtaccactcataggaattgttattttcagattctgctattccaaaggctagtggaaaaaattgtttatttgcatcctttgaaactgaaatcattaaaacaccacaaattttttacttcaaaaaagttacatcagcagcaatcactgttctacaatgattccaaccagctagtgatggtccatatgcataaaacatataaacaaacctgaaaatacagtataaaagaaggttaatagaagttaaggactgccagtccttaacttcgacttacaaggtcaaaagttaaggacaagtcctgaagttagactaacaaggtcagaagttaaggacaggcagtccttaacttttaaacatgtaaggcgaagttaaggactgcatgtccttaacttataaacctgtaagtggaagttaaggactccctgtccttaacttttgaacttgaaagtcaaagttaaggataacacgtccttaactttttaactggttaaagacaacatgtgttaacgtttataaaacagactaataaactcttttttgattgtttacctgttgttgtcgtctatctttatgttagtatatgttcccgggtttttacttctcatcatatacaagtatgaagacaataaattacaattctcttcaggtgttcctcttattaatgcagaagcatgttgaatagcacgccacgccttgtgataaccaatgtctagtccatgcaatttttgtatttctgccatgacaaaagttggtgtaacttcaaacattgggtctcgaagattgtcaataatttaaccactaatcaactttgaagttgcatgcctttgatcagctttcatagtgttaactgagcagtaatgatttttctcgatctttactatcttgaacaatgttgaatctttaattctgaaagcacgcccacaccacccacacctatcatcattgcatttcaacgaatatcttattgagcttgatctaacaaccttgaattcaaaatgtcctttaattgctatattcgaaaaatagttaattatacttttctttttgtcaaatattgatcccactttcatttcatctaacgaagcattttctcttaatatcgtagttggggattctttttgtttcaagtttgaccttcgtctagttggttgagtagaattctttccagcaacttcttcaattatcggtgcactctctaagacttgaatacccaaagcttgttcgttgtcaatctctagaatgctttgtccttcaacttgaatagaatcaaatatttgaagcacctctccagttattggttgtgcttcaaccatatctatttccattatctgttggcatttgttttgattgtcatgttcagtttctctgttgacattttcaagggtgcttgttgatccaaaatctctttccgaaatatcaacaatgaaatgacaacccttgaatagtgaatgagtttttagtaactctatacatgtgtgaagatctaaatatttggatacaagcattcccttgcttgttcccaggttgatatcaaaccataacattgcttcaaacttgtctttatccaattcaataacttcaaagatctgtttagtgaaatcttcaaactgaattgcctcaggtactagaacaagatttgtttgatgatcaagatatttatagtcttcagtccatctaccattaaatgcaactataatgcatattgtttccatcctgcaagtcaagcgaaatccttgtataattaagaacaggtactgtaagttaaggaccaagttcaggaccaagtgtccttaacttttgaacttggaacctaaagttaaggaccaagtgtccttaacttttcaacttcaaaatcaaacttcaggacttagtgtccttaagttttcaacttgaaattcaaagttcaggacttagtgtccttaagttttcaacttgaaattcaaagttcaggacctagtgtccttaacttttcaaacttcaggacttagtgtccttaagttttcaacttcaaattcaaacttcaggacctagtgtccttaacttttcaacttcaaaatcaaacttcaggacttagtgtccttaagttttcaacttcaaattcaaacttcaagacctagtgtccttaacttttcaacttcaaaatcaaacttcaggacttagtgtccttaagttttcaacttgaaattcaaagttaaggaccaagtgtccttaagttttcaaacttcaggacttagtgtccttaacttttcaacttcaaattcaaacttcaggacctagtgtacttaacttttcaacttcaaattcaaacttcatgacttagtgtccttaagttttcaacttcaaattcaaagttaaggaccaagtttccttaagttttcaaatttcaggacttagtgtccttaacttttcaacttcaaattcaaccttcaggacctagtgtcctaaatttttatcgaattattacaagacgcgatgtgcctaaccttatcaatccagaaattcaaaaaaaaaaatctaatttgtaccatcaaattcaaagtaaagaaataaaaatcaacagaaacacacaaaatcataacttactgtaaatttatgtcgatttttggactagaaagttgaataatatggtttgaaatatgagaagctcaagttcgcgatcacatcctctgttgctgaagttagttatgtcctgttgctgcttgtgctgatcgttattaaaagccaaggtatagcagaagggtattttcgtccagtcaagtaaaaattcattaaactagtggctaaagaataaatacatttaaaacactggcttaaaaataaagacagcttctcttagtggctatttgtgcacatcccccataaaagtgagtgtaatagtgtcattttttcgtattttttcgttcctacacattattggaaattttattacgaaaaatatttaagtttttgtatttacccgaataaaatactttagttataaaatatatacaatccaccttaaaaggctctcagtccattattagttccttcaattaaggaatttagttataccctttttctctctcctctcttctctacagatcgaacatatatttagagatttctatttgctaattgtctggtctttttttttttaaatccttaaaaaaatccatatcttctcgttgtcagtttgacacgtatgctaagtgtggacgtcctgatgaagttgccaatgcataatgaactcaaagtacatgacattgtcttgcttaattctatgattaccattaattttaactccaacagaattaaagaggcgaagaagttatttgagtcaatgccctataagatcttaggcctcgtttgtttgcacttaatggaggtctgaatcttaattatgcatatctcatatattaagtgtgtttgtttttaacgtctgagtcttaattattcagatcttaatcattaagtgtatttgtttttttacttcacagccacttaatgggtttgaataggtctgtatgattaagatctacaacagagacttaatttcattaagatgctatcacatattcattatgtcacgaccccaaatcctaactggtcgtcatggcgcctatcgtggaactaggctagccactatcacataacgacatatttctattggcgatatttaccaaaacatgaataacattccataacaagtataaacttttctaagtctttaaacaacgtaaatgaactaacagtctaatcattccccagaactggagtcaacagatcatgaacatctaagagtactactaacactgctaatgtcatgatacaatgtatcagaacaaagtactaaatactaaatgagggaagggaaatggagatattgtggacgatgtacaactacctcaaaatcccgaatgctgacgtcgtacgaactcagacgactactgctcaggaccagtacctggatctgcacacagaggttcagggagtaatgatgagtacgccaactcagtagtaataaaaataaatcaagtctgatggtaagaaacacagtaacaaaacatcaattcacaaatagcaaaaatactgagctttagcattgtatacatttagtcataaccaacaatgaaaaatagaaagaggaaggaaaaactcgtagaagaattcctcgccttgctcctattgtgtctctgcctccttaggtcgaatctgtgtcaaaagtatgtccaacctctcaaaaaaccgttcttccatatatatataccaagtagggtcggacccaaacaattataccttctccaatgcaaacaatgacacttttcccggtcaggacgtgcgcgggcgcgctctaaccgcgctcagtccgcgcacaatgcccagtattctgccccatttgcgaggttagtgcgcggccgcgcacttgctgcgcacttttcacccatttccgtttggaatttggaaaaccttaaaacatgaaagttgtagccctttgagttagatttccaaccatatattgtataacccaaatggagttcgaagtaaaaagttttgtccattttactagacactgcgtaatatgcctactcgagtcttcgtttgttcttaactatcaaatttgacccctgaaaatgatcccggtttaattccttgggattttactcagacttaaaagctccaaatcacttgaattcattccataacatctatatatctcgaaatcactcttacaaggcataaaacacacaattagtgcaaaacactagcggttaaagctcaaaatcaattaaagtgcaataaattagagtgtgataagcgactaaaatacgtaattatagcctatcatcaggatccataggtgcgatggtcgcagatgcgggatcaagatcgcggatgcgaaatttggctaacagggcagttagcgcaggttgaagtgttgtcgcacttgcgagcctgcatgtgcgaaggagggaaccgcaggtgcagaaatgggcggataagtgaaatctgcaggtgcgatacccctgggcagaaactatataagccaccctacgcgaaatttttcccattcttcaccattgttgaccgattttttgagctttgggcagtgaaattcaggggagaaacaagagatatcagtgaggtaagttacttgggctttattacgtgtgtttataatgattttccattgtttagtcatgaaattggtaagaatttagggtgaagttgagggagttagtgcttgagttttggatagtttgaggtgaggatttgagggaccaaacaaagacggaatttgatgaattttatatggttagactcgcgagggaacgagctttctagttatgcaatttttgacaggttttgagacgtgggtccggggcccaggttttagcctatttcgtattttggcctatttttgtagtttttcttgcagaattcatttctttagcatatgttgatagtattattctgattatagatagattcagagcttttggagattgaatcgagggacgagggcatcacagagtaggattttatgttgttacggtaagtaacaattttaactctagttttgagggtataaacccggagaattcgatatcatgtgattgtttggaggtgatacccacggtaggtgacaggcgtgtgggggtacgccgcgagggattgagacttggtccatcccgtgaggttgtgaagcctaatagccattatttgtgtttatgtatttatatgttgtagaacttgattgccttcatgtgagggatcatgattaggctttattcatgatcacattatttgcactcaatcacagaaattcttgtacatgtttgcctcagtatctattatcttgatgatacgttgtaatacttgatttagattgtgttcccttatttgttgagaattgtgaggatagagaggtacatgactgcgtgaggccaagggcctgttgtgagatgtttgattatagcacgtgagttgtccgtgcggatacaaatatgatatgatagcacgtgagttgctcgtgcagcatgtgagttgtatgtgcttagcgcttgggctgtaggagcccctccggagtctgaacacccccagtgagcggatgtacctattgagtgtgtgcattgagggctaagtaataaagtgacattgttgtattggtaaaaaagatcttcacacgtgtaataattgtgacgactcaacaatctatgtggaacaatgaaaacgtgacaactggacgggactctatgtagaggtacgaggcaaagaggcacagaatagcatacccacggggtaatcagctacgggaatctcaacctgattgagaagaagaagatacacagtcaaaatgaatccaggcaaaataaagggcagattcgaagatcttcaattaatgagccagacgttatataatcttcactcaacagttacggttaatcattgtaacgtttcattaatgccattattagtcattaatgctcaatcattgaaaagggtagacgttatattaagaaattccctatataagggagtaaaatataacttgtgaagacacattcgaactactattgcaatatacttacttttttgcgcatcatactgctttccatttacgaatttacttacaattattagtttattctttggttatcataaattcgtgttcttcttaaaatatctttgggcaaagaatctaattctttggttaaacaaattggttccgttgccgagaaactgataatctttgtttacttttaaacaacattctctgaattatgtcgaacgccaacgacaataaccaacaaagggatggaactccagctccatcaccttcaggaaccccacgaggttcaagggaacattctccagaaagatctactactcaaaacaacaatcataaccgtaacgatcaaacgggagaacaagatcaagtgaaacaattgattgcaaaatatgtaaaccaagccttacaagactttgtgagggggttaccagctgcatcacctacaccacctcctaacaacaccataactgtggaaaatcctcaatccggactagaaaactcaagaagtgggggcactcataacgaattcctcgaagcgagaccaggtatgtccaataacccagaattacaatctttattactaaccttgcagaaacaggtgaaggaacaaaatgatcgaatcgaacaaattcctggagtaccacctgttatcaaaggcattgacgttgatagatattctcaacaaccttggaagccaagtgcagcacccttgtctattcccaagaaattcaaaatgcctgacgttcccaagtatgacgggacaaccgacccacgtgatcatgtaactgcttttaccaccggggtgaaaggcaacgacctaactaaacaagaaattgagttagtcttagtcaaaaagttcggagaaacactcaccaaaggagcattaacctggtattctcttttacctgaaaattccatagactcttttgatgagcttgcagattcttttataaaagcgcattccggtgcgcaaaaagtcaaaaaaagaatggaagatatatttaaaataaaacaaggagacgcggagttgcttcgagaatttgtagacaggtttcaacgagaaagaatgctactaccaagggtacctgacaattgggcagccatggcatttgcaagcaatttaaatgataaaagctcagaagccacgagaagactcaaggaaagcctgagagaattcccaatcacgacatggaacgatgtctataacaattatagtaccaagttacgtatagaagaggacacaattgctcaatcaagggctgaagatcgaaccagttctagacgctccgaaccagagaggagaacaggtaagaacatgtgcgacccttatatgggaccttcgggatgagagactcatcccaagtttgaaaacacctggtcatactacagaccgtcaaatagagatacgggctcatcatcgtcaagatccagaaaggatcgagatgaacggaacagaggtaatacaagaattggggaccataacttcaatgtaagtacttctaaattaatcatagtattgaggaatatgggcgataaggttcgatggcccaaagaaattaggtcgaacccataaaaggaatccagacttctggtgtgaattccataacgaccatggacacaaaacgtcggattgcagattattgcagggtgaggtagaacaattattaaaacagggctatctaacagaattgttagtaaaaaggaaagcaggcatatatgaagaacatgcaggagcccccaaaaccaccatctccaaaacgaacaatcaatgtgcagcaacccctagggggatgccacttataaacactaatataataataataaatacaaacatccttttattaaaataaactagcaaaaggagaaaaggaaaatatgcccatgaataaacttcaacatacaacatcccaacttagaaaaaaaaatatctcataaaaatctttttgtaatttcaagatacaattatttttaaaagaaagagagaaaaagaaaatgacaacatctatttaagttaaattaatactttaaaatttaccaaatacctagtagaagaatatcttttcatacatcatgcaagactcaaactaagcatacaattcaactctcaatcaaataaaagctagttaaatcttcaaaaacaaaaaaaacaatctcccaagttcaattcaagtaccaaatttactaaattacaagactttggcttaaacacccataaaatagtcaaatcgttcaccaaaattaagttaccaaaataatagtgtcatgacccaataatcatttaagagtgtatatctaagtgtatcatatggatcatgtacaagtccccaaaagcttacaaacaaaaatgatagatgcctatgcaagtgtgatcttcatctagtcttccaaagagtctacttcaaatgatatcctcacgcatctcccggcacatcacctacgataataacaaactatcgctaagcataaagcttagtggcacacaaacttaactaatatttcataataaaagaaaggtaaactatggaatgaatacaaggaataaattctagatatgagtttattaaaatcaacatcaagtacttaatgaaggtacaatcatctcaagagggctaaatatcaaatcataaaatagttgaagataatcactactcaagatctcaaatgtcaagaagattttcaaccataatccgaaaatatccatcgattaatttattcgcccaacacatgcgtcatgcaattacatcaaaacataatcaagcaacaagaagaacgggagtcctagaccaagtagggtcgtcacccaattatcaagagaatcaagagcaatattgaaagtggctttcccatacatactaaaaatggacaaagtccatgattaggatggagtgtgaatccaaagtcaagatgggacaagatccaaacaaaaggcatgccaataaaagtgacaaagtcactatcacaatagggacaaaatcccaacaagaatgtaatgatgctcaagcaatccgtatatgtgggggagttaaattgtctgtcaaaaatactttaaatgaccctcatataagttttaacatattcataatcaattacaaaattatacccttcatgaccactaacaaatcgaaatgcctcaagacattctttctcaagcgacaaagcaagtaaactagtaaagtaacaaccaaatcaatatgacaacaatttaaagtaaggtacaaatttcaccaaaccttaaccacttacaatatctcaaaaaaattaactcgaaagaaacactcaagggatttaagatcttctaagccaagaaaagagcgattttcctaaggtgcgctccttagctttaacaaatatctcttgtaccttaaacacgtaatcaacactcacttaaggtatgaaatttagagatgtttaaaccaaatcatgatgaatatcaaaaagggggactaaaggggtcacaactattttactaaaaatctggcagcaactctgctatgtgtttccgccttcttttgacatagtatacagcagaattgaccattttggtcttcataacaattgtagatatatgtcttatctttatacaaaattttaaagcactacaatccgagttttggagaaaaagttacgctcaaattactaactgctgcccagttcaaaaacgggattaaatcccttactttcaaaatctcaaattctctaacaacaaacttaataatttcaccaaaatatatattgaacaagaagcttaccacaagtttgagagagttactccacaaatccaaacctaggatttcaaataagcttaacccatcttgattcttgaagataaccttctaacatatattcaaaggataatgactaaaacttttatgtaaacaaatgtgatcttgatggtggtgggagaagatgtcttatgagagagagaaagagattttgctaatataaagggtttatatccaaatgagtagaagctagatattatttttctcaaatgggtcaaaatatatttaagggacccaataggataaactaagtctttttacctcccttttttaaaatcaaataaagtagaaaattgaatttaagaaaattaataaaacgttagcaataaaaacaagatcacctacatatacataatttatttataaaattcagggtgttacacaatgtgatacatggaggtgaggaggtaaacggagtagtctgcaaaagaagcacgaaattcacgattacacacgggaagcggattcgtgaagacttggaagcagacaatatatcattcgacgatgcagatatcaacggattaatgcttccacacagcaacgcactggtagtatccctacttatacatgacactaacgttaaaagagtgttggttgatccaggtagctcagtcaacatcattttgtcgagagttgtggaagaaatgttaatggaggatcaagtaatcccaagagcacgagccttatctgggtttgacaactcaacggtcataacaaaaagggaaattgagcttagcacttatgcaggggggggggggtaataaaaaatactaggttccaagtcattgatactgacatggcctacaacgtaatcatgggaagaccatgaatccatgacatgaaagaagtatcatctaccttgcatcaggtaatcaaattcccttccgagtggggaattcaacagattcaaggcgatcagcaaacctcaaggaatataaattccgcggtacactataacaaaaaagaagaagcggaagaatcaaaagataaggaaatcccccatgcagaaattgttgtccaaacatgtacagaagaaattgttactcaaacaggtatggaagaaactattactcaaataggtatgaacgaagatagccacgagaaggtgaaccaagtcaccacggaagatacatcaaaccataaggacgtggattccagacctgatgtcattcaggaaccagaagaggacgaacatatcaaaacaactacgaaacaaatcgaagctattccactgttcgaacagaagcctgaacagaaagtccacatagacacaaggctaagccccaacagaagaggtaagttaattgattattcaaaagctaacgcagattgctttgcatggtcccattcagatatgacaggtatcccaccaaaagtgatgactcataaactaaatgaagatccatcattcatgcttgtcaagcaaaagaaaagaaagcaaggaccattaaagaaccaagtgatcggcgaagagggggacttattgttacaaagtcatgccttttggcctgaaaaatgttggagccacgtatcaaaggttagtgaccaagatgttccaggaacatatgggaaagacgatggaggtttacatcgatgacatgctggtgaaatcaacacaagtggaagatcatttccagcatctttcaattaccttcgaaattttacgcaggtacaatatgaaactgaatccgaaaaatgcgccttttgcgtagaatcaggtaagtttttgggtttcattgtgtcaaatagaggaatataagtaaatcatgctcaaattaaatctatcgatgaaatacccaatatacttacgagcaaaaaagaagttcaaagactaacatgcagaattgcagctttgggaagatttatttccaggtattcggagaagagttttaaattcttttcagttcttaaaaagacagaatcagttcgaatggactaaggaatgtcaacaggctctcaaagatctgaatgactatctatcaaaacccccgttgttgtcaaagccaaaagagggagaaaggttgtatgtctatcttgtcgttgcagaaattgtcgtaagtgcagtactggtaagggaagacagaggtaagcaatatccaatttattatgtaagcaaaaccttattagatgttgaaactagatatcctcatctagaaaattagccttggctttgataatggcagctagaaagctaagaccatattttcaatgtcatccaatcactattgtgacctcatacccattgagaaatattatgcataaacaagaattatcagggagattagctaaatgggcaatagagttaagtgagcatgacataatatatcagcctagaactgcaataaagtctcaaattttagctgattttgtcgctgactttaatactagcataacccctgaagtagaaaaagagttacaactctttaacggggctaatccaggtatatggaccctatttactgatggctcttctaatgtaaaaggagttggcttaggaatactcttaatatcacctacgggtgaaaagatacggcaagctattaaatgttatcccataactaacaatgaagcagagtatgaagctgtcattgcaggacttgaactagcacgagaactctagatcgagcaaatcacgatcaaaagcgactctcagctggtagtaaaccagatgcatgggacttatattgctagagagaatcagatgcaacaatatctgcaaaaggcacgagatctagtaagacaatttaaatcattgaaggttatgcaaatacatagggaggaaaatgcagatgcggatgcattagctaacctcgcagcagttatagaagtgacaaataaagacaatgcaattgtcgttcacttatttcactcagcaatcgaccaggacaaaaatgaggtaacatttaacaatttaacctgggattggagaaatgaaattttaatttttttgcagaatggtatcgtacctaaagataaaaaagcagctcaagcacttcgccgaaaagctgcacgatactgcctcattcgcaatactctatactgcaaaatgtttggaggtcccttagcaaagtgtcttggacccaatcaaatagaattagtgatgaagtaagtccacgaagaacactatggaaatcatgcaggagcaagatctttagtcaaaaccctaatcagagcagggtattattggcccaaaatggaagaggctgagagtttcgtagctaaatacgacaaatgccaacgatttgctaacaacatgcatcgacaagcagagttacttcacccagtgatatcaccatgaccgttcatgaaatggggcatggacatagtgggaccccttcccccagctaaaggaaaggtacggttcttactcgtgttaactgattatttcacaaagtgggtggaagtgaaagcttttaaataggtacgagaaaaagaagtgaaaaacttcatatggcgaaatataatttgccgctttggaataccgaaggagatcgcatgtgacaatggcccacaattcattggctcgcaaatcacagaattcttcgaaagttggcaaatcaaaccaatcacttcatcaccatatcaccccatggctaatggtcaagtcgagtcaacgatcaaagtcatcgtcaataacctaaagaaacggttggagaaagccaagggaaattgcctgatgagctaccgacagtattatgggcttataaaacgactacaaaaacaaccacgggagaaactctgttcgcgcttgtttatggttcagaagctttaatatcggtagaaattggtgaaccaagcataagatttacagcaacaacggaagaaacaaacaacgacgagttgcgaaccaatctggacttgctcgagcaaagaagagaagttgcactaatacgaatggcagctcaaaagcaaatcatagagcgatattacaacagaaaagctcatctcagatatttcaaaattgggggctttgttctcaaaaaagtcttccaatcaacaaaagaagctggtgcaacaaagctaaatccaaattgggaaggaccttacaaaatctgtggcattgctgggaaaggcacttatgagctggaggatatggacggaaggatcttaccaaccagttggaatgatgttcatttgaagaagtattacttctaagtaaaaggaatacccccagttaggtatcattacgatcgattttaattttgtacagttaaaattatgctaaccgttttagatgataagcaaaaaactaacccatcacaagatgatgatattagacctacaaagacacgagtaagtaactgaattcgcggtctagggttacaacttttttatggacgttttaaagggttaaccagtcatcatctaaaaactatataccttcgagtcccggatgtttttccttttcgggaaaaggataaaaaggaaggaatattcaagtgctcgagatttcattattcaaagctcaaatacttggggggactatacagtatggagggcaaagatgaagcaaaaaagactaccaaaaagtcaaagctcgagcctgaagatccatattcccaacaagtcaagtactatgagcaaaatcaaaagagccaaagactcaaaacacaaagcctgactcaaaaaaaccttcgagaacatgttcgtaaatgtaaacgaatattcaggttaaaggcagaatactagttacgggtagaaatacacatctttgtacttactcaaaaaactgttgtaacagaaaacagttacggatgaaaaagcattacccttgtttacatttgaaaactattatcaataaaaacagttatgggtaaaaattcatacccttatatttaaaatagttgtaaacaaaaacagttatccccttgtactaattcgaaaaaactgttgcaaaagaaaaacagttacgagtgtaagtttatatcaaatctgttaaaagaaaacaattacaaaatgagttatagacgatacgcaaacacatgtgaaatgttacgaaagttcaatacaaaaactttctttaaaacattgttaaagaaaaacatgtgaaaaattcttatctctctattgtatatttacaccattatgaagttgagatgtcttcttcattacgtgtcaatcaaaaaagggccctcttccttaaaacgtgcctattacgaaaaggtacgaataatctaagcattttataaatgcaaaactcagaggtaaacctaaaacctcaagaataaagcatgcaaatacttaaagagtgaaacaaaaactcgaaagaaactaaagtcatgctgatattgatattgatatactaacggcaaaatatcgaaagaaactaaagtcatgctgatattgatattgatatactaacggcaaaataaactaagtgttaacttagtctaagccatattaaattttacattattttaccctaagttgtcagtttgggacttaggaaaggatccaaaaccctcgatgggactgggggtaaccaccaattgatacaaataaaaaaagggagaaccaatttcttcaaacttttctagatggggggttgtctcactagcaggaggttcaggttgggatggtgagacacgagcagcagggacctcaacctctggggaagaatctttttgactttgctgatacttctcaatggtctatttggttttagcaatttcggcttctaagtcaaaaccttttttcccattttcgtcaatgtgtcaagacgagagttcagataagcccaactaacatcgacgactgctatgtcttcaagagcttcataatctttctcccacagttcaacctcatctcttaattcatccctttcagccacaacaacatcatgagaggtctttaaatgagcgagggatctttccagaaattggaccttctccaaataattacggagatcctcctgggtttgagtaagcgattgaaaaagttcaccagaatactcctctttctggtccaataagtccttcaagctcctgatctcctcagaggcacgggaaagctgctctgcaaacgaagactccaagacactcttgtccttgcctgcctaattagaaaatgccttttcgacggccaactctgctgccataaccctggcttgctgctctaaggtacacttttcttcttccactgcctccatgtcgggttgtaaactctcataatgctctttccaattatctgcttcgatacgcaaatcccttgctgcctgctccatttgagaagccctcttcattaactctgtgcctataagattgatctacaacaggagataaattagatatggtaaagatgtatatgaatacatgtgaaggagagaacattttacctttaaagaagagtgcacaatctcatttacccaagtgagggaaccgtggctgtctagcttagctttctcagtcggacctatcaatggcttcaaccatacgtcagcctggcccgattttttgaagaggttgcccgatgttggaacctctatcatcacctgcctcatctcccccctgctggaagaccctacttctacaggagaaggcacggaagcagggacagatgaaatagcgacgggcagagaagtctgagaggcagaaaaagccacgggagcagaagcaaccacaggagcgggaataaccatgggagcagaaacaataatatgagtagttgagggaaattctttaggagcaggaggagaaaaaacagcaaggggatcttcatcggctatggtaccaaaaccttcacggaacatgagatcaactgattcacaaacaggagagggagttgcatcctcgggggcagacagtttagattcaggcacaggagggtcaatgacatgtgcaaactcatcgtcagagaccacctttctcctacgtgacctatggactagagaaccctcatcttcttcctcctcctctaaggtccttgacccgcttgcttttctttttgaagaggaggaaccaaaaatgatctcctaggccttttccagggataactttggagcagacacagttgcgacagaaataccacgagtaggaaacaataccaaataaaagggatcaagtaaaactcaataaaagaaataagtaaaaacaaaaattccgctcacattgggtcttgaccttccaaccaaacctcccagagaggtatttccacgaacgttcttctaacggagcgattaacaagagtttttctacccaatatcgaaaaccggagacattctcaacggttcccatggctgttgcaaagaaaagaaatagttacggtactgataaagtataaaaaacaaaggaaagaaatgtgagcaaaactgtactctcatgcaagattccacttctcagggaaggggcgattttcttcacctactaaaccagcagtaggaacaacaacataccggaggaaccaccctcgatctttatcattatcagggattaccaacacccttttactcctagccgcgaaagtaaacactccctggcggaacatcattggagaatagaggtgaatgagatgataaaaggtaaaggggaccgaatctaaagtatccaaatatctaaggcacgcaacaactcgccacacgagaggactgagttgtctcagacaaactttaaagaatcgacaaaactcgatgataacgggatcgataggagacttgaatcctaatgtgaaaatatgagtataaacaaaggaatacccaaccttgtaagaggttattctttgattactattgggaatgacaacagaaaaattaggcttccagtaacagtccctgcgtataagagatactagaccctcagttatttgggtagggtacatgttagccccgtcatgagaagacattgaagaaagctgatcctttaaagcccgactatccctagcgaaagaaaaatccgcaggtactatttcgtcgacccttggctcacgcaaaggtttattgtgttctctaccttttgatgaaaatctagaatccctatcccttggagaagataaagaaatggcagacctagaagaagataggggagtaacatgagaagaagaggaacccctggagggagtagaacctaaactcctaagccaatcgcctctcctactccgtgtcggagcggaagaaggagtcagatcatctacgttaatgattctcttagattgctggtttgaagaagacatatttacaaagacaagaaaaaagttgcaaacgaagaatgaaggttagaaggttttcgtgaaagtaaagaaggtaaaatgggtatttatactcaaaggcaatcgtcaaaaaatggaaaaaacagtgatgtgaaagtcataattaaagatgtcacttcgtgactgatgcagccgcaaaaagccataaaaggcgttgaatgattgcacaaccaatctagagatgccacgtggcacgggcattaaatggaaatgacaagcgacgcctacattcagagatggatgcaatgttacgagtgaagcgacggcaaaatattcccgccataaatgagtatccacttaccaaatattaatcgataaataaatggtaagtggggggggaggggggacattcctgtattggtaaaaaagagcttcacacgtgtaataattgtgatgactcaacaatctatgtgtaacaatgataacgtgacaattggacgggattctatgaagaggtatgaggcaaagaggcacggaatagcatacccacggggtaataaactacgggaaactcaaacattgagaagaagaagagacacggtcaggatgaatccaggagaaataaaggaaaaattcagagatcttcaattaatgagccagacgttacattaccttcacgcaacaactacggttagtcattataacgttacattagtgtcattattagtcattaatgctcaatcactgataatagtagacgttatattaagaaattccctatataaaggagtataatataacttgtaaagacacattcgaactactattgcaatatacttacgtttttgcgcatcttattatttttcatttatgaattcacttacaattattagtttattctttggttatcagaaacctgttgtaacgacccgatcagttgttttgagctctagcgcgtcgttcagcggttgaaagtcatgaacaacttcatttcaggtattatgacttgtgtgtatggtcagagttgaaatttaggaagttcggagttaaattgaaagaaaagttttcatttcagaagccaaaaattggaagaatcgactaagactgggatttggagtaaatgacctcggaatcaggatctgaaggttccagcagagtcgtatgatgattttggacttgggcgtatgtccggatcggattttggataacccgggagcgtttcagcgtatattgtggaaattagcatttttgaaggaatttcctaagtttggcttgaagcgcatttcagagatattgatgttcgtttgggattctgagtctagtaatagcttcgtatggtgattctggagttgggagcgttatcagaagtgaattcggatgtccagaggtcagtttgaagtcatttggctaaagatagaaatttgaaggtttttgaagaatctgaccggaagtggaaattttgatatcggagttggaatgcgattccgaaagttggagcaggtccgtaatgtcgaatatgacttgtgtgcaaaatttggggtcaatcggatatgatttgatgggtttcggggtcagatgtagaagtttgaaattctaagttcttaaagatttggattggagagcgattcgttgtttcgatgtttttttatgtgatttgaggcctcgagcaagtctgtgtcatgttttggtacaggttggtgtaattggacggggtcccgggggcctcgggtggattctggggggttaacggttcaaatttggagttgaagaagagctgaagttgctgtcatctggtgtgactgcacatgcgaggctttggccgcaggtgcgactttgggagccgcaggtgtgagttttgggctagagctgaggaagccgcaggtgcgagagtttgggcgcacctgcggaagcggaggtgcgagcaggagaccgcaggtggggaaatgaggcctgggcagaatgtttttaagcgagaatcatgtcatttctcctcctattttcatggtatggcgattttgagcagcttcaaggagggaatttcatcaaggatcacaagttttggggcgttgtgcatccattggagtcatcggaaggtcttggaagccggttatgaagtttcggagcgagctaagtctcctttctaactttgtgagggggaattgtccccataggtgaactaaatgaatatatgttgttatttgcgggggctacgtacgcacgaggtgatgggattccgtgcgcagctactattatgcctatgtccgggtagtctaggacccactagaatgccttgcgtgttgtacatgtgatcctgtcaataaagttagataccctcgacagtgcataatttattattgttggtccgcgccgttcgaccctcggcattttgattgcgcatgataaatgttgcgtatttcctgtgatttatacttcataaatactgtgtatctcacgtgatttatacatgataaacactgcgtatttcctgtgatttatacatgtttatcgtcttaaggaaaagttgaaatgccagtttaaatgaagaagaaatggtgtgtaaaaggtgaaataagtttgatgtttcttatcccttgttattaattgattttatatgatactcatgcttagcacctcacctgattatacttatccgacttatagaaagtgtctaatttgacctctcgtcactatctctctgaggttaggatacttactgagtacacgttgttttcgtactcatgctacacttgcggtgcattttgttgcacaagtaccttcatagcacagttgttgacttggagacttagagggactgcatcatccggaggtgttccgcaactaacagagtctcccttctatgaatttgcactttattttaaagtctttgtccaatttgcacctcggacaagcgttgtataatggtataaattcgtagaagttgctcatgtacttgtgtcaccgggttctggggatgtgttgggatttattttcttaaactgagttgattttctgtcgtatttagtttacgaagatttattatttgattatgaaatacaacgaaaggtaacgatttcgaaaatgtttaaaacgggaattattccaactagttaagaattggcttgcctgacagtggtgtccgacgccatcacgaccttatggattttgggtcgtgacaacatggtatcaaagctctaggttcccctaggtttcacgagtcatgagcaagtctagtagagtcttgcggatcagtacggagacgtctgtacttatctttgagaggctacaaggctgttaggagtacttcccttcttgattcctcatcgtgcgatttgatttctctgaggcttatgcctgtgtttcttcctactcaatcttatacgtcgcgaagcgcttgttacgaatcgggaatttgaggaaatgtaacggtgctacagatatggtgcgtgatgttttccgtacgtagttgattgggttgttgttgttgccctgcagaagggtaatatgttatttcggctcaatagccgtgtttctgagagccttgaggctatgctcaggcagtgatgatatttatgattggttatcatgcgatgtgggggtggagatagaatgcttgcccgtgtgttgggttgatgaatggtttgaagggaggtcttctcaaggcgtgatttcgagatttcagtattttagtttcggcagaggaaaggcatttggactatgaatggtccggttcggattgataaagtagtaagacttggtgtattcaattgagatggaatattcgcttgtgttgtgatatcgtcgtcattagtcgaatggaatgtgataagctcgtcagtgctatggtttcttcggttgcattgggtcagaatgtggttaaatagtattgaagaagcggttgtcatagaccggggtgtgcggtggtcaaagtattgaatgagcatttcttattaaggtagctcgaggaagatgatcttcggggagtcgaagttatggtaatctgctggtttaggcattgtagagaatgatatagaattgaggccgcaattgagaagcatgcgatgaaggaagtcatgtgagaagtgtcaggcgacgactaaaattataaaagggtcggtcataagagaaggaagtcaggtagtgctgaagggaatgagtttaactaaagtgggagagttgcagcatagcatatgagttcagtggtaagacggttgcctatctcgaggagaagttggagtgatttgagaattttagtgaacggtgattaggtctacgatcttaaactaggatgttgattattcggcggaaggttggatgcaacagagaggagttgtcagggatgaagactggatgcaatgtggcggtgaatttgaagatgttgtagcgcatttagtagaggtccacgaggagcggacggacaggcaaggttggtgaatgagagcagacttgggatggggtattgatgttgtagagggtgtgcaacgtagcgttgttggacgatgttagttggtgattcgcacatgtgggttatctcttgggagtagattagcggttgggtggttggcaagtttctgcaaggaatcatagtggctattcagtaggaggcagaatgtgtgaatggtgctataggatttaggtaattagggaatgctaacaggagaattcggaaggattggacgggttggttgagaaagatcatgctagaaaaggagaaaggatctcagcagggtctagatggtgcaaggatgtagcttcgggctaagtgagggagtcccaccacctgcagttgggttgtaggattgtgttctcttggggttacagatcgtcggcgtattagcaagttgttactgctaaggtaaaggagtgaaagggtgactgtgcgtgggatttgaggaatgtatgctaaagttggccctgttggatcagggttagacttgaaagattcaggattttgcttaaggcataggcaagttgtaagggtagtgactcagtcacgtgcttcattgagagcatgttcatgttctataagagccttggagttgattggtgatgtgccggagaatttcggcacattaaataccaaattgcttagattgtagcttgtttttaagagaatttaccttttatacttatggaattttgatgttttgcagtgcatgaggcttaaacactcgagaacatggaaaatagatcaaaaagctgagaaagtgaggaaaagagcaaaatgcgatcgcataattaacaagcggagaccgcatatcggctatgcggaccgcagaatgcacaaatgaatcgcacaattcaacagaatgtttggcaaaatttcagagcaaaaatgcggtccattatgcgatctcacaactggtttgcgagccgcataatggaccgcaaacctccaatgccagaagccaagctcagaaatgcgatgcaactctgcgatcgcatatcaaaaatgcggatcgcacatcaactatgcggcgacgcacctggaacctagggttttcatatgcgatggtttcgtgaagaatgcgaaccgcattcctgttatgcgacaggaatacggtcgcatagtagacctggaagggcaattttgtccgttttttacccgagtttgagcccactataaatagatttattgcgtttttgtgggtcattcttgtctggttttagagctacaacataccctttgaatattcctctcttttggaagctttataagtgaagattcctccatttttgtaagctttatgacattaaatactattatctttttgtctttaagcatgagtagctagttttaaatactaaggttgtggaccctaaatgggtgttatgttattgggtatttaacattgaatatatatataataattggttgatatttatttagttctcattcttcatttattgttggtggttgcaaacattaacaaatgccattaattctttcttagcttggaaaagtgagttagaattggtaggagtaaataccaaagactcaaggctttaagccttgtttaatagaattgcttaggaataagtgagttttatttggcattaattggtcacttttcattgcaactcttttatatttggaaaaatcataaagagtaaatactacccaactattggaaaatattgggtagtcatttagaaatcatttgcatatctaaaggaccttccattagaaatatatcatattaacacccattagcattacatttcattgaaggggacacaaccttggtttagtaaatcatattaatgacaactctaattaatcatacttgtcactattgcagttaaatcattacacaatcaattcccatatttttgttaccttaacggaatagagatacgatttaagttgagattcacactaccaaagtaatcttttcacgcctattccctgtgggattcgaccccaaccttgttgggttattatatttgacttcgaccgctttgcactatttttaaggtgtaatttgagcgtatcaaattttggcgccgttgccggggaatacagttttgaaattactagatagtgtgtactttactttatatctttttctattccatcacactttgctcattttgtttggtgtactaggtcgaaatggccaatgtttatgatgaagaggagaaccctttcgccgacatcaaagaatacattgacaacaccaatgttatcctccctccggttgttggtgcatctacattcaaattagatcatggaatgattctcttgctcaaggcggatgggttgttccataactcaacggatgatgatccgacgcaacacctaaggaatttcttgggtgtgtgctccatgcaaaaacaaaccaatgtgacagatgatgctttgaggttacgggtattcaagtattcattggcgggagaagcgaaaaaatggattcaaaacttacctcctcaaactatcacaacatggcctgggcttgtcccagccttcttagcaaagtggttcccagatagcaaaaagtcagagctcagagacaaagtatttttcttcaagcaactgccaggggagcacttacacgaggcatgggatcaattcaagctgtacctagtgagatcaccaaaccatgggttcccagaccatattctgatggggaagttctatatgggtttggacccactatcccagtccattgctaaaaatgtcgcagatgggtccttcatggacaagtcattcgctaggatcactcaaattctagacaaaatggcaaagcataatcaagcatggcattcggaggatactagcggtggaatttcttatggtactccctctctgaccaacatgctaaaagagaatcaagagagagaccagttgattgtcggtcttgctactaacatcgatgtgttaacaaagatgttcactgagggtcaaacaaaaaaggtaaatatggtggaagacatgcaatcgatggggagtcaagattttgaagaagcaaattatgtccaaaactctcaaggtggttttcgccaacaaaatacttggaggccaaacccgcaagggcaagggcaacaaaattggcgaaatgatcaaagtggtcaaggatcttggaacaacaacaacaattatgccaatagaagttccaatccttatgttccaccaagagggaaatattccaactcctcgcaatacaaagaagggtcgtcgaatgagtccaaaatggaggggatgcttgagagaattttacaaaatcaagagcgaagtgatgcaacaatgaaaaacatgtccgaggtagtgggatcacacaccgcctccattcaaaagctcgagatgcaaatgagggatttgtcacgagaacaaaatcccaagcaaaaaggtactcttcctagtaacacggtggtcaacccaaaaggtggtccaagcgaaccatcttgtcattgcatggacatcacaactagaagcggtaaggtgctccaagatgaaagtgagcaagtggttgatgtagaaaatcttgatcaagaagtgaaaacacagattgagttgccgagtgtggttgaaattgagaagccctctcaggaggtaaagatccaagaatcaaaacatggagagggtaaggaaaaagtgaaggagaccccaaaagctcctccactaattcctcgacctactcctccattccctcaaaggcttgcacgaagggtggacgatggcaagtttgaaaaattctatgacatcttgaaacaattgtaggtaaacatcccattcttggaggctttaaaggaaatgacggggtttgccaaatatttgatgacaaaaaagagaactacaaagaatgaaggggtaaacttgactcatcgggtaagttcgataattgctacaaccaccgtggagaaaaagggagacccgagagcattcaccattccatgtaccatcgggttgagatattttgctagagcactttgtgacaacggtgctagtataaatttaatgcctcttgctatctacaagcaagcgggattggggttgccaagaccaactagcatgcgattacaaatggccggccgagcaattaagaaacgcgtgggcattgttgatgatgtcttggtaaaggtggggaaattccttctcccgtccgattttgtcatcttggattatgcagtggacaaggagattcctataattctaggaagaccattccttgcgacgggaagagctttaatggaaccggaacaacatgaaatcaagttccgagtgaatgatgaagaagtcaccttccaagctagcaaggggctgaaactgccaagtgcatacgagggaatctcggtcattgatgtagttgatgaggttgaagatgccattgagatgaagatggaagaagaatgccccggcgaggcattggcggcaatcttggtgaactttgatggtgaagatattgaggggtatgttgaaatagagaacgcattggaaggacgtgtgttacaccccatattttcgtacgtgggagtacgccataagtaaattgatataagatcgggaatgatatttattttgggattataaagtatttgttatatctcgcgctttcgtacgttaagttttgtctttcaattaatcggcgtagattcggggatgagattattttgaggttaacatatgtatgctatttataacaagcgacaagtaagtgtcatgaaggagaaaggatacacaaattaaagaaaacgagttctgttgaaggtggccgatttgggataaaatacgggccgagttataatactcgatacttatggactagtaccatacaaggtaccatatgatcgtgatagtatgttatataaagtgtattaaaagtgaatagtattttaattaagttagagataattcttaattatgtcggtaattaataattatctttttgtggaagattaattaagatcttggaataatcaaatattttggataacttagcccccaaaacgtggcagcccccccatattccattagtgactcttaattcaattttcaaggtgtaaataggtagagacttagcaacttatctcattttgttaagagataaatgtaaccataaaccacgaatcattccattcggttcctttgcaagcaagttagttgtgtgttccttgagctttctcaaagttgtgctgtgaaatcattccacatacaatacaactagttatccgtccatgcactctcatattgagaagcacttcttgtccaccaacattctcggattgtatatgtcgattccagtgcctaatttaaccatcgaaaaattgatcaagtacagtttataattttgactagtaagacacatatgattgagaagaaattataggttcactaatccctttatattggtaagagttatggtctcgtcatataagggagtacggtacaatctttctcaagaatatagtaaggatatttccctactttgatccggcgttacgtgttcttcgcaaaagacatatgttagagggattgtccagagaaccgacttaggtatgttaaggccatcttttcttttatttttgcatgatctcgtaattacacaagtttgataacgaggcataaagaaaaattcatatcccggaatttacaagtaattaaaattataagcaaaatatttgtgttgtgttgcatcaattcatttgctgcaaacatcgggagcaagtaaagttttaatatctaatctctataaacattagattagtctcattaaactattagatgtattaagagatttacaaatctatgcaatacaaagtgaacagaaagattttgatccaatatatgcaacggactcaactaatattttagcttattaggaaagtacaaagagaaagaaatgaattcttctatgttttgggaaaaaggaattaatacgttgcattatagctttgttaaagtatatacataagtcattttgtttaaaatatgacataacgactaaatttaaattggaagaataatgtttgaaacaatacaaagagtgatgataaataatagtgccaaaatagacatctgtcccaactctagtattaactagaataatgactttcagtcaagagagcagagaatctatatatacagtattacattattttcattaccatggagctataatcgatgggcaggcccctattgggcaacctctgatcagatggtaagttatataccgagcctactgtggccgagcgcctatgagtgagcccagttggtcgagatacgaagcctagtatggctgaacgcctatgagcgagcctactacggcagagcagttatatatatatataccgagcctactgtggccgagcgcctatgagcgagcccagttggtcgagataaagagcctagtgtggccgagcgcctatgagcgagcctactacggcagagcagttatatagttatatatatatatatatatatatatatatatatatatatatatatatatatatatatatatatatatatatatatatatttaccgagccttatagggccggacaactattttacttattatatttagagaattgagtcagtatgagcaggtaaacatatcatgagattatctttgacttccagctacctgtagttattatattatcagttcagtttcagctttcagtatactgccttacatacttggtacattattcgtactgacgtcccttttgcctggggacgctgcattcatgcctgcaggtatagacaactagtttgatgagccctcatagtagacgagattagtattcagcgaagaatcggtaagactccacctcattcggagtgcagccgagtctataagtcatcgtgtcagagtttttctacagacttataggtaggccggtaccctgtcccactttatgtcagataatcttagaggctttgtagacataggtttatcatgtacagtgtatcaaaggccttgacggcccatatgttttcatgttttatgaatgatggttcattgatataacatttgctcaattacaattgtacattaagagtattggccatgttggcccatgatagttgcaaaaaaaaaatgatgagttacagattggtttgctcgggccagtccggcaccgggtgccatctacgcctccctaggtttggggcgtgacaaagtggtatcagagtagttctgtcctagggagtccataagccgtgtctagtagagtcttgtttatgggtgtgtcgtgcaccacacttatatgcgggaggctacatggcatttaggactgtcactctttcttcttactctagattgtgtggtagagatcacttataagaattcaaattcctaacttctattttattcgtaataagacgatacccacattcagaaagacggtcgttaagagatatagccgtggaggtgtggaaatcaaatgaacccaattttgcattatgcttatgataagtaaatgtgaggtcttcggcataccggacgtgtactaaaaggtgtaaggttcttgataaggagttttaaggcaagaatacccatccactcttacggtaaaaaggaataacagaatcggaatgtagacacaagtttcagcaagtaaaagaagcaaggtgaagaagggtacgaggtacccagttaataaatattatcattatttaccattgagtaagggagatatgagcattttgagttacattcaacagtgacagatgtgcgtacaatcgaccacaccgatctccgttatgccctatgagagcaaacatatatagtttaagagaaggacaggttatcaagatccggctggggttagagtaacccaaaatattggatggattggtaaagttagttgacatttccaaaggataatgcaaacgtggtaatggatctccttatgagacacctagatggtgcactctaaaatagtacaactagatatgagtactacaaagataggtactggaaacctggaaaggataaataatatcttagtatgactcctgtaactagtagagaaacaatgctaggcaacatgaagagccagtagatggaacaaggggagctaaaagcaaaagaatttcttcttcgacttttcagaataaagtgatagacatagatgttagcgggaaataagaaaagagttagtgaagcattataagtaagatgtgatacttggatggcaacggtaggaaaaaaaatgaaaataatgtcagtattacataatctatagttaagtaaaggaaaagacgagaggtgacatgccttgatacaacaaaagagtataggccataaagtcgtatcctcactttgagaattaagttcgtgactccaacgcaactaccgaaaggaaaagttagaccctaaaataataggaatcagtatgggatggtgaacaagataaactaaacgtgaatcatggactgagtgattggataatactcggcatcatgagagtttcatttttcattccaacgataatagaatatacaacataagaagattcatgagaaattcagagaatggtcattcgggaaggtgcttccctaaagcaagcaatgtaagcaaagttaagcttaaggtactgtgtgtgccagttacactaagtgccaccctcacgagtaaggaatttcgttatccttggtacaaaaggattattgaaaggcgagtaagggtcatcggtaatgtgagaagacgctaatgatgaaaaggtaaagcatctataggtaggtcatcgtagcttcaactcttagtacttccctaaaggggggaatatggagtaaggtggcattaaatcaaaattaagtggttctagtaattacggaatagtaaacggaaaaaaaacatatgaatgaaaaagggatgaaattgcacttattcaaagcctacatatatgctataattgcagaacattatgcaaacactacgtcaaggaaaggaagtaagggtccctgcccgagatgttatttatatataaagagtcagtgtgagacgtaagttaagacaaaggaaataacccaagaaagattacgcggaatattgatatgagaatgggccaacgaatagttagtagtagattcaggaagaacctagtaatggatagacaggtggttacaaacgaatcaacatatcatgcaaggtaaacatagtaaaacccagtatagtgaattcagtcccgcagttatgacattgtaatacttgagaaatattcagataggaatcggggtaattaaaggtaccatatgagtgttaaaagtaaaagagagcgccaataggacgatggttaaaatatcaagttcagaagcaacccggtaagcataagggcgtggaggtaagtaaccacgaataattataagtgaggaaggacatcaatttttttgtcgagtatacgatctaataagctcatagctttacaagagtcagagggtcctcccttaatactacaatgaaagactagctgaggaagtaaggaagaaggcttcaacctaagctcagtaacctacagagaaaatagtcatataacaatagtctcacaacaacattgtaagaactccaaaggaaagtagcacctactgtggctaatgaacggggagtaaaaattaaaagtaatattcaagatgatatgagttgcaagagaaccccggcatgcgtaaaaactaagataagctaagcatgtatgaaataagggggcagaaagaccaggaatagtgatagctatgctaaagaaagctaagaaggaacgaaaggaattattcgatcaatgatcccgagatagttacgttatgaacgcacttaagagttcgaagtataatccatgcagcatatatgttggcaatcatgcagtcctagaagaaggattgaattgttaggagattatatcctgaatattccatagcacccatgaagggctgaagtaataccatgagccacagatagggagatggcttaagactacataaaggttgatcataaggaagaggaaactaaagagttacatcaacgaagtaaatcaggagtctgattattggacccagaaaactataaaaatcgtgattgagaatattgtagaattaatcttaatatcaaaggtacaagagagatagtacaacaaccatattctataacggctctacgataaagcaagttagaagaagtactagcctcataaaaagtcagtatgaatctcccaccgaattgtataggcaccataggtgcaagtattataatagaagttcaagttatggacgtgaagtatacctatgtgggagggaggtcacaaaagaaatagaagatacgatgcaagattttaaggtggtaaggtaaaagtgaacaacgtacgagatactcaaatgcagaagattgtgaatagtccatacttcggataaaaggctagaagcacggcgattcggtatccaggaaggatagaggttccattagtggaatatcttccagcctatggtttctaggtatcaagaggtctagttaaaagagtaaagaagagtctgagatgatgcgatgtctcgcttaacattccagaataacataaagaaatataggatgcaagcaagttgaaggaatattgtgagtagtataaatagatatgtatgggtcgcatgctaaagtatggtagagcgacaagattgtaggaagacaggagtaaggataagaaagggcaagtaagaaggtgacgaaaatagataagccctcgggattaagcccacgaaaatgagagagagcttatgggttctataaattatagaaggctctgatagccagaatgagctcaaaggagtctaagactagtagcatttataagaaatggaatacctccctagtagtgaaataaaggcataatggtgatagataaaggataacgtctgcggtttcgattgagtaatggcttgaagaagatttcatgaattgtaagggactaaaatactcatataaggtgaatcaacaatagatggatgaaggttcaacagtataagatgaaattacactatcagtcataagaataagcaacgagagtaacctggagtttgttgcagaccttaataacgataaattgaagtaagagttatggtatagtatgacctaagtagatatagaaagtcatactaatggattaccaagtctatgaaataagatataacaatattcgtaagttcgacaaactaccgagcgaagaacttcagtaattgcaaaaaaaaatcgaagaaaaaataaaggaaagaagagtcgcataggcgcacttacaaggtcagaatcgtacatgctacatgatagatggtagcaacagttacgagattgagaggattccaacaacaagtcatggtatgataaagaggcctaaagcgaggaatgccttggcctttgtatttattcacaaaacaactgcctaaatggcaagaggagtactaaagtattcacaagagctatgggttataagattgataagtgcatcagtcaacattcgagaacgaatgttccaaaggggggaatgatgttacaccccatattttcgtacgtgggagtacgccataagtaaattgatataagatcgggaatgagatttattttgggattataaagtatttgttacatctcgcgctttcgtacgttaagttttgtctttcagttaatcggcgtagattcgtggatgagattattttgaggttaacatatgtatgttatttataacaagcgacaagtaagtgtcatgaaggagaaaggatacacaaattaaagaaaatgagttctgttgaaggtggccgatttgggataaaatacgaaccgagttataatactcgatacttatggactagtaccatacaaggtaccatatgatcgtgatagtatgctatataaagtgtattaaaagtgaatagtattttaagtaagttagagataattcttaattatgccggtaattaataattatctttttgtggaagattaattaagatcttggaataatcaaatattttggataacttagcccccaaaacgtggcagcccccccccccccccccccccccatattccattagtgactcttaattcaatttgcaaggtgtcaataggtagagacttagcaacttaactcatttggttaagagataaatgtaaccataaaccacgaatcatttcattcggttcctttacaagtttaggcatgcaatgcaagttagttgtgtgttccttgagctttctcaaagttgtgatgtgaaatcattccacatacaatacaactagctatatgtccatgtactctcatattgagaagcacttcttgtccaccaacattctcggattgtatatgacgattccaatgcctaatttaaccactgaaaagttgatcaaggacagtttataattttgactagtaagacacatatgattgagaagaaattataggttcactaatccctttctattggtaagagttatggtctcgtcatataagggagtacggtacaatctttctcaagaatatcgtacggatatttctctactttgatccggcattacgtgttcttcgcaaaagacatatgttagagggattgtctagagaaccggctcaggtatgttaaggccatcttttcttttatttttgcatgatctcgtaattacacaagtttgataacgaggcataaagaaaaattcatatcccgaaatttacaagtaattaaaattataaccaaaatatatgtgttgtgttgcatcaattcatttgctgcaaacatcgggagcaagtaaagttttaatatctaatttctataaacattagaataatatcattaaactattagatgtattaagagatttacaaatctatgcaattcaaagtgaacagaaagattttgatccaatatatgcaacggactcaactaatattttagcttattaggaaagtacaaagagaaagaaatgaattcttctatgttttgggaaaaaggaattaatacgttgcattatagctttgttaaagtatatacataagtcattttgtttataatatgacataatgactaaatttaaattggaagaataatgtttgaaataatacaaagagtaatgataaataatagtgccaaaatagacatctgtcccaactctagtattaactagaataatgacttccagttaagagagcagagaatctatatatacagtattgcattattttcattaccatggagctataatcgatggacaggcccctattgggcaacctttgatcagatggtaagttatatacggagcctactgtggccgagcgcctatgagcgagcccagttggtcgagatacgaagcctagtatggctgagcgcctatgaacgagactactacggcagagcaattatatatatatatatatcgagcctactgtggtcgagcgcctatgagcgagcccaattggtcgagataaagagcctagtgtggccgagcgcctatgagcgagcctactacagcagagcagttatatagttatatatatatatatttaccgagccttatagggccagacaactattttacttattatatttatagaattgagtcagtatcagcaggtaaacatatcatcagattatctttgacttccagctacatgtagttattatattatcagtccagtttcagctttcagtatactgctttacatacttggtacattattcgtactaacgtcccttttgcctggggacgctgcattcatgtctgcaggtatagacaaccagtttgatgagccctcatagtagacgagattagtattcagcgaagaatcggtaagactccacctcattcggagtgcagccgagtctataagtcatcgtgtcagagtttttctacagacttataggaggccggtaccctgtcccactttatgtcagataatcttagaggctttgtagacataggtttatcatgtacagtgtatcagaggccttgacggcccatatgttttcttgttttatgaatgatggttcattgatataacatttgctcacttacaattgtacattaagagtattggccatgttggcccatgatagttgcaaaaacaaataaaaaaataaataaatgatgatttacatattggtttgctcagaccagtccgacaccgggttccagccacgcctccctaggtttggggcgtgacaacgtgggtcctacacatatgcaccaaataagctttctcttgacttagagaatcgagctacccctcctgcaaaaccttcaatcattgagccaccacaacttgaactcaaaccacttccatcacacttgaggtacaaatttctcggctctaataatactttaccggtaatcgtgtcttttctgttgaatgatgtgcaggttgatgaattattgaatgtattgcgggagaaccggcaagcacttgaatggacaattgccgacatctgaggaatccccgtcgggatatgtgagcacaaaattcaattggaagaagggagcaagccaagtatggaacatcaaagaagattaaatccttcaatgcaagaagtggtcaagaaggaaataatcaaatggttggatgtcgaggttgtctaccccattgtggatagtccatgggtgagtccggtacaatgtgtgccaaagaagggaggcatgacggtgattcacaatgaaaagaatgagcttaaactcactcggacagtcaccggatggagaatatgcatggactaccggaagcttaacaatgccacttgcaaggatcatttccctatgccttttattgatcaaatgcttgatcggctagcgggaagatccttctattacaatcaaattaatatagccttggaggatcaaaagaagaccacattcatttgcccgtatggaacctttgcctttagtcggatgccctttggtttgtgaaacgctccggccacttttcaacgatgcatgatgtccattttctccgatatggtggaggaattcctagaagttttcatggataatttttcggtggtcggtgactccttcgagcattgttttgacaaccttagacaaatgcttaaaaggtgtgaggaaaccaacctcgtgctcaattggggaaaatgtcacttcatggtagatgagggcattgtcttggggcataaaatttcaaaaaatggtattgaagtcaatcgggcaaagattgagatcatttccaaactccccccaccaacatcggttaagggtattcgaagctttcctgggcatgccgggttctatcggcgatttatcaaggacttttccaaaatttcaaatcctatgtgcaagctccttgaaaaggattccaagtttgtgttcgatgagaagtgtctcaaagcatttgacgagctcaaggagaagctcaccacgacacccattattgtcacaccagattggtctcttccattcgagctcatgtgtgacgctagtagtgtagcaattggagcggtcctgggtcaacgacacaacaaaggtcttcatccggtttattatgcaagcaaaacactcaatggtgcacaaatgaactatacggtgacggagcaagagcttcttgctattgtgtatgctttcgaaaaattttgagcttatttgttgggatccaaggtggtcatctacaccgaccatgccgctcttcgatacctcatggaaaagaaagacgccaagccaagactaatccggtgggtcctcttgttacaagaatttgattttgaagtcaaggaccgaaagggcaccgagaaccaagtggcggaccatatttctagacttaaagaagacgggagaccaaaggatgatcttgatatcaatgatgcctttcccgatgagcatatcttggcattatcttctccaaccactccttagtacgccgacatttccaactacttggttagtgacctaatcccggatgatctagaagcatatcaaaagaagaaattcttaagagagtgtcgataatattattgggaggagccattattgttttgtatctgtgcggacaacattattagaaggtgtgtcccagaagaagaaatgatgcaaatactaaaggcttgacatgactcaccggttggtagtcatcatggaggtaatcggacggcggcaaaagtgcttgaatgtggttattattggtcctccctctatcatgatgccaaccaaatggtcaaatcttgtgaccaatgcagagacagggatcaatctccaagcgacacgaaatgccaatgaactttgtgatggaggttgaaatttttgatgtgtggggcattgactttatggggccctttgtgagttcctgcggtatgaagtacattatggtagctgtggactacgtgtccaagtgggttgtagctattgccttgacaaacaatgaggcaagaagtgtgactatgttcttaaagaagaacatattcacgaggttggcactcctcgagccatccttagtgatggtggttctcatttttgcaacaaggctttcactggactgctagagaaatacggtgtcaagcacaaagtatccactccttatcatccccaatcaagtgcccatgtagaagtctccaatcggggaatcaagaacattctagcaaagacagtgaatgcaaacaggaccgactggtcaaggaagctggatgacgcattgtgggcataccacacggcgtacaaaactcccattggtacttccccctaccggttagtgttcgataaggcttgtcatctacctgtggaactggagcacaaggccttgtgggctctgaggaagttgaatttggactagactgaagctgcaaacttgaggctaactcaactcaacgaaatggaggaatttcgttcccatgcttatgaaagtggagttgtgtataaggaaagaatgaaatttgttcatgacaagaagattttgaaaagggagttcaagtccggtgacttggtgttgatgtttaactcaagactcaaactgttcccgggcaagctcaaatcaaaatggtccggtcctttcaaagtggtagttgtgtccccatttggcactgtggaattaacaactgaggatgggctccgcactttcaaagtaaatggccaacgcatcaaacactacttgggtacagatagagagcagcatgtggtagagcaattggctctcaaggatggtccttgtcctattgatgaatgacttcacaagaatgccaacttcgtcgtgtcgcgatgttaaatcaagcgcttcatgggaggaaacccatgtgtggtaacactcttttatcttttaaattttggctttgagtaaattgggttctttgagcaatttaaagtgtgtgttatagtgtaggtggttcaaaagaccacaaaaacagggtaaaattacaagtaaaagggaagctggaaaaaattacaagtaaaagggaagctgagaaaaactgtcactttgcgacgcaaatgcgatcgcatttacactatgcggaccgcattcttattgaagaactggacagtgagtttggtattttttatggctgatatgagatgccaaggtgcactatgcaaaccgcatttcctttatgcgatcacatagtgcatcgcattgtgaacattgagcaagcttatgaacataccaccacataaccagtatgcggtcgcatactaggctatgcggtaaagtctccatcgcatatagtccaggtaagcttcctacccttttcacatttctaaccccccacgttctcactaatcgttcattctcactaacacaaaacaaaaacaaaaaaataaaaaaaaataaaaaggggatgagagaaagacgaataaaagagaaacgactaaattcacattgcacaacctatcacaaaacgacatctgtggagtatcatcttgattcttgcttcattttcgtcctcagctggtacgtttttctcttctcatctcaatccatagtaaactcttttagtctaggattaaattctgttgaaattgtttgaacattttggttttgcacgttttgtttccctgttgtttctgggtgtatgtctactcgtaaggactcgtgaaaagtaattgtaattaaggcttggtaggtagtaaaagtggaatatccattgatgggttgaataaatctctaaggacgatgagttctgcggtccgcagactcgttctgcgatcgcattctccatcgcattctaagccctaggtcaagtgggtaagcgaccacaatgcgataactctgtgatcgcatagttgatatgcggaccatagatccatcgcagaattgcacagtgtaagccccaaattcacctccgtgtttacgataggtctgcgatcgcagactcacctttgcggtaggttatgcgatcgcatagtggtttcactaatttttgtttgattctgcgatgactatgcgaaccgcataatggatatgtgatcgcatatgtcatcgcattgttgattctttcaagcaataagcaactctgcgataagtttgcggtccgcatagtggttatgtgatcgcataacctgtcgcagagtggatttttccagttaaattcttgcttatgtatgctacactactcacacatcttttcgttgtagatatgcctcgcaaacatataccttcaaccggtaaaaaggcctcctcaagccggaaagcacctccggcaaaatgttcacgtccagcaccaccacaatctattgatgaacattcttgtattcggggccagtcagagtgggtgactctcagcggtggtcctagtaaattcgaaagtaagagaatgtggtgtttaagggtttcaagcagcagtatgattaagaattgatcttttgcagcataatttatgagaaaaggaaaacggttggaatgttctatgttatttttcggcatgaaggatagtattggagggtgagggaaataaaactccgggttgtggaaagattttcaagagggtatgagacgggttgggggatttaggcagcatggtctcgtgaatcaaggtcattcgggatcaatgagggttgagtttgctatgagttgaaggaagttactattatctctgaggaaattaaggatgataaaaagaagatagattggttagccatggttgaaatggcacatgtacggcagtgatcaattccttcggtgtgattgagtatgtgtataatttgtgcagatgtgtgtggggctttccggccgtcgtgatagatctcatttggaagcattcaagtgttatggcctgtcaggtgtaggcggatcccggaaggtttatggcggttccggccactacttaaggatttgcatgtcttgtgattgtgagaattcacttgtgtgttgttatgattcttatgaattgaggtaagtaataggttttctatatgatgaagtgttcagcctagtgtggttcaggagttatggtggaattcctatgttattccatatcggcatgttagtgcagtaagcagtatgtaactggaagtaagaatcgagattgcggttcggtgttaacaaggatgtcatgagctcggaggagcaagaacaagggatttgagagtccagagtaaactggtgttatcttcagtgtcacctgagatcgatattcgatgaatgaggttttgtgacctggtcatgggttcttgatgggttttgcagggttaatatggccggtggtatggatgtgcagacttgttatcttgtgtggaaggtcgtgggagcatgaccgcgggaagattgcataagtgtgacttgtagtcacctaatggattgagagattagaccgagtttgaggaagtgcaagcttatttgaggatgtatgccaggaaggcgctcagttcatatttgttgtgagttgtggggtgttttcctggctatgatggttgttcttgcgtgttatgaaagaaagtaggtcgttttggacctaggaaaggctatcagcctagttcagtgcgagcagaatcgacttgaagtgtatgaatggattcaaacaagattatgggcttcatgcgagtcagatgttttcatttcaatatagcgttcctcaaggaggggtgttggaataccaggtgttatcccgtcatcatcaaattcatgtgatattatgattgtgttgtgtgagttatgaagcggcttgataatttcttatgtgttgagattccgcgtagtgatgaggttatgtgagcaagatggctcttgagattcagattatatatcgcacctcagttgtgcttgagttttgtagcatatggctctatcagtctccccataatggtattatgcacttagcgtgcttgtgactggtattcagtaatttgtaatagtgagcaaattcagctctgtgtatattcccttatgtaaattttatgatgggaccgggtggcaagtagccacgggtatgttatttggattggattgcacgccgaaacaatgtgatgatgggcacgattccctatgattatttctcttatgttatacttcctgtattctgaggaaagttcatattagttgcgtgagttgagtagtccctccctgagtcatttcttatgtatcatgttcgagttgtggactattggcgcattgtggcatcgtgtgagactgttggtcatgtatgggatgatttgtgtctgaagagttcatactaggtaagacgagactattggatcagatatcagtgcgatgggattttgtgaattgtggtaaggaacaatgccagtatttggtttgtaatgagataatgatctaagtcaagagaaaagatttcaaagtttggttaactctgcaattggttagaaatttctacacaactcctccattgtggtggtattgtcaaaattatagcaggatggtgttatatatatgataagatacatcgagagcatcaaattcgtagaattttggctattaaggttcaagaagtgtcattgtggtcaggtgatgaattatgcggtgcatggtgctaattcaacaaaggtatgcagttgtgttctggtgcctcgtgtggtagttgatatggtgttcatatattagaaacaggcccgacagagaatttccggtgttggaattgagtacggagcttgctgcatgaataaaggaggatatcttcaggattgatcaagcttatgtgctcaactgcgttgtgacagcccgggcaggtgcaccgggtgttaaacagtgatttcagataactcaagagaagttctcggcacgttcgaggacgaacgtctatttaagtgggggagaatgaaatgacccgaccggtcgttttgagctctagcgcgtcgttcaacagttggaagtcatgaacatcttcatttcaagtattatgacttgtgcgtatggtcggagttgaaattcagagttaaattgaaagaaaagttttcatttcagaagccaaaaattggaagaatcgactaagactgggatttggagtaaaagacctcggaatcaagatctgaagattccagcaggttcgtatgattatttcgggcttgggcgtatgtccggatctggttttggataacccaggagcgtttcggcgtatattgtggaaatcaacatttttgaaggaatttcctaagtttggcttgaagcgcatttcagagatattgatgtccgtttgggattccgagtctgggaatagcttcgtatggtgattctagagttgtgagcgcgatcagaagtaaattcggatgtccagaggtcagtttgaagtcatttggctaaagatagaaatttgaaggtttttgaagaatctgaccggaagtgaaaattttgatatcggagtcggaatgtgattccggaagttggagcaggtccgtaatgtcgaatatgacttgtgtgtaaaatttggggtcaatcggatatgattttatgggtttcgaggtcagatgtagaagtttgaaattctaagttcttaaagatttagattggagagcgattcgtcgtttcgatgtttttgatgtgatttgaggcctcgagcaagtctttgtcatgttttgggacaagttggtgtaattggacggggccccgggggcctcaggtggattccgggtggttaacggatcaaatttggagttgaagaagagctgaagttgctgtcattttgtgtgaccgcacctgcgaggctttggccgcaggtgtgactgcacctgcgaggctttggccgcaggtgcgactttgggagccgcaggtgcgagttttgggctggagctgaggaggccgcaggtacgagagtttgggcgcacctgcggaagcgcaggtgcgagcaggagaccgcaggtgcggaaatgaggcctgggcagaatgtttttaagcgagaatcatgacatttatcctcctattttcatttggtatgggcgattttgagcaacttgaaggagggaatttcgtcaaggatcacaagttttggggcgttgtgcatccattggagtcatcggaagggcttggaagccgattatgaagtttcggagcgagctaagtctcctttctaactttgtgagggggaattgtccccataggtgaactaaatgaatatatgttgttatttgcgggggttacgtacgcacgaggtgatgggagtccgtgcgtagctactataaatgtccgggtagtctaggacccactagcatgccttacgtgttgtacatgtgatcttgtcaataaaattagattgatattgctattgaattggtaatttatttcctaagaaggctagagtgtacctttcgtaatcatttacaaagagaattgattcctccctggataattgtgttcctgttaaggttttattattgaatattattgaacttggcaaatgaactttaaacattatttaaatactatcttcaggttcacctaaagagaattttaccattttcttgaaaagctattttcttgataaaatgtgtatttattatgtgaatacgtgtacctatgatcacctgagtcgcaggtatgattcgcgagcatgttagccttattattattatgttgaccgcgtcgcatgatcgattcgcgagcggggaaaatagatgcatctatggttcgagtcgttcaaccctcggcagtgcataatttattattgttggtccgcaccgttcgaccctcggcattttgactgcgcatgataaatgttgtgtatttcctgtgatttatacttcataaatactgcgtatctcatgtgatttatacatgataaacactgcgtatttcctgtgatttatacatgtttatcggcttaaggaaaagttgaaatgccagtttaaatgaagaagaaatggtgtgtaaaaggtgaaataagtttgatgtttcttatccctggttattaattgattgatactcatgattagcacctcacctgattatacttatccgacttatagcaagtatctaatttgacctctcgtcactacctctctgaggttaggcgggatacttattgagtacacattgtttttgcactcatgctacacttgttgtgcattttgttgcacatgtaccttcatagcacagtggttgacttggagacttagatgggttgcatcatccggaggcgttccgaagctgacagagtctcccttctatgcatttgcactttattttaaagtctttgtccaatttacacctcggacaagcgttgtataatggtataaattcttagaaattgctcatgtacttgtgtcaccaggttctggggatgtgttgggatttattttcttaaactgagttgattttctgacgtatttaatttacgaagatttattcatttgattatgaaatgcaacgaaaggtaacgatttcgtaaatgtttaaaacggcaattattccaactagttaaggattggcttgcctgacagtagtgtccggcgccatcacgaccttatggaatttgggtcgtgacactcgtgttcttcttgaaatagctttggacaaagaatctaattctttggttaaacaattgctgtgaggtttcatttacttttgttgttgctgcatttacctgctaattgccttgtagcatctgctgatttatggaatttacctgcttactcatgtttatccttaattgtgaaaagaaataattggattgttctgcttatctcgtcactactactcagttctttagttatttctattactactgatttagttgtactcatactacaccctgcattttatgtgaaaatccaggtgagttagagcgcggcgatcgttgagttcaggccggctatctttggagaatgcaaggtagttgttagcgtctgcaaggccttgttactccttttatgatctatttcttcttttgggctatattgacagttagatagtttttatatattagttcatagatttagacgctcatgacttagtgacaccctgatgtttggggctcgttttttcgcatttctattttcataacaataggcgccatcacgacatgggttagattgggctatattgacagtaaataggcttgcatggtatcatgataggcgtcatcacgacatgggttagatttgagtcgtgacaagttggtattagagcctaggttacataggtctcatgagtcatgagcgggtttagtagagtcttgcagatcggtacggagacgactgtgcttatcttcgagaggccgcataacctttagaaaatttcccattcttggattcttgtcgtgcattatgtgttttctagtaactaaacatctgttatttcattctttcacatatggtgaggaattatgctaccggtcaagaggaacaaccatcagcaccaccagctcgggccgtgagaggtcgaggctgcagtagaggctatggtaggggcggatacatcgccagcgcaacagctggggcagcacctacagatcccccagttgtccccgctcaggaccaggtcctggaggtagaggtttctgcgggaccagtcgaggcctgcatgtgcctattgttattctgagccttcaggaggccctggcccagattatatcagtgtgtacgggcctttctcatgcggtctcaattacttcgactgcaactacttctcaggccggggaggcactcagactcccgtcgcacgcacacctgagcaggttattcatggactacaaatgtcgggggcacctccagccccgccagttgcaactgctcaggactatgtagctcctgtgatgctacaggatgagaaacgcacattggagaggtttgggaggctccagcctccgtcatttagtggtgctgagggtgaggatgcacagggtttcttggacaagtgtcagaggatgcttcaaactgcgggcattttggaaactagtggggtctcattcaccactttccagttctctgggctgcacttaattggtgggagacttacaagaggcataggtcggttggcacaacgccctttacttggcagcagttctccattctctttatggagaagtttgtacctgagtcccgcagagaggtgttgcgcaggcagtttgagaagcttctataggatgagatgtttgttacaagtatgagatgcggttctccgagttggcacgtcatgcagtctggttggttcccacaaaccgagagaggatcaggaggtttataaatggcttcggttttcagcttcgattgcttatgaccagagagagagtatctagtgctacctttgatgaggtcgtcgacattgctcgacagattgagatggttcgaggtcaggagagggttgaaagggaggtcaaaaggcctcatggtcagggggattcagtggtgctcctcatggtcagggggattcagtggtgctcctcatgagggtcagtttctgcagggtagaggccgtccattcagacatgctcagtcagatcacccatttcaccatggtgcatcatctggccatggtcctcacagtcatcaatagggtcagtcatcattcagtgcactgccaacgcaggattctcatcatgccctgttcgctcaggtatctccaagtagttctttggggcatcaggagcaacagtttcatcatatgaggggttgttttgagtgtggggattttggacgcattatgagatattgccttaggctgttgggtgggactctacaatggagtacttggctgacggcaccgacaccagttcctccaccacccgcccagccagctagggcagagcccaaacagctaggggtcgcccgagaggtgaaggtagagtaggagtggtcatgcccgtttatatgccctcccatccaaaccagatattattgcttcagatggtgtgattacaggtattgtctccgtctgtcacatagatggctctgtattatttgaccatgattctacatatttatatgtttcattgtactttgctcattttctgggtatgccccgtgagtcattatcttcacatgttcatgtatctactcctatgggtgatactattgtttatggactacgtgtatcggtcatgtgtggtgcctatttggggtgtggagacccgagtggatttgttgttgcttagcatggttgatttcgatgtgatattgtgcatggattggctatatctatgtcatgttgttctagattgtcacgccaagaccgtgactttagcgatgctgagatttccgagggtagagtggagaggttttatagattatgtgccaaatatggtgatttcatatttgaaggctcaccgcatggttgagaagggttgtctttcttacttggatttttttagagatgttagtgcagagactacttccattgattcagttccggtggtatgtgattatttgaatgtgtttcctgtagacctgtcgggcatgccgcctgacagggacattgactttggtatggatttggtgacgggcactcagcccatatctattccgccatatcgtatggcatagcggaattgaaataacaacttcaagaactcctagataaggggtttattcgatctagtgtatcaccttggggtgcactagttctatttttgaagaagaaggatgggtccatgagcatgtgtattgactacatgaaaatgaacaaggtcatagtcaagaacaagtatcctttgcctcgtattgataatttatttgaccagctccagggggcaagggtgttctctaagattgacttgaggtatgggtatcatcagctgaagattcaggattcaggtattcctaagacgactttcaggacctgttatggccattatgagttcttggtgatgtcttttagactaaccaatgccccagcaacgttcatgcatttgatgaatagcgtataccaaccacatttggactccttcgttattatgttcatttattacatcctggtgtactcgcatatctaggaagagcatgctcagcatttgaggattgtattacagagattgaggaaggagaagctttatgcaaagttctccaagtgtgagttttggctcagttcagtagcattctcgggacacgtggtgtccaatgggggtattcaggtggatccaaagaagataagagcttaagagcttaaggcctagattgtcctcagctacagagattaagagcttccgagctattaccgtcgtttcatagagggattgcgtctatcgcttcgcccttgaccaaattgacctaaaagggtgatccattcaggtggtcagacgggtgtgaggagagatttcaaaagctcaatgttgcctagaccaactccattgttagttctgccatcagcttcaggttcttataccgtgtattgtgatgccgtgatggtaggcattggttgtgttttgatgcaagagggtagggtgattgcctatgccttgcgttagttgaaaacccattagaagaattattcggtgcatgatcttgaattaacagccattgtcacgccttgaagatatggcgccattatttgtatggggttcattaggatatttatactgatcaccggagtctgcaacatctgtttaaatagaaggatcttaatttgcgtcaatggagatggttggaacttcacaaggactatgacatcattattctataccatccagggaaggccaatgttgtggttgatgctctgagtcgccgggtaaagagtttggggagtttagcatatcttccagtagtaaagaggcctttagcattggatgttcaggccttagcaggccatcttgtgagattggatatttcggagcctagttgggtattggcttgcgtagtctccaggtcttctctttatgaccatattagggagcttcggtatgatgacccccacttgcttgttcttcaagacagggtccggtgaggtgatgctagggatgtgactattgatgatgacggtgtggtgaggatgcaaggccatatgtgtgtgcctaatatagatgggcttcaggagttgattcttgaggaggcccacagctcgcggtattccatccatctgagtgccgcaaaaatgtacccggatttgagacaacactattggtggaggcggatgaaaaaggatattgttgggtttgtggcttagtgtctcaattgtcagcaagttaagtatgaacatcaaagaccaggcgacttgcttcagagattagacattctagagtggaagtgggagcggatcaccatggactttgtagttgaactcccacgtacttcgaggaagttcgatgctatttgggttattatagatcggctgacaaagtctgcacacttcattcctgttggtattacctacacttcagagcggttagttgagatttatatccgagaggttgttcgcttgcatggtgtcccggcttccatcctttctgatagaggcacttagttcacatctcagtattggagggccatacaacgaggattgggtactcaagttgagttgagcacatattttcaccctcagacggacgggcagtccgagcgcattattcagatattggaggacatgttgcgcgcttgtgttattgacttttggggttcataggacccgtttctgccactcgcggagtttgcatataacaacaactatcagtcgagtatctagatgagtacgaggctttatatgggaggaggtgtagatctccgattagttggtttgagccgggtgaggctagactcttgggtacagatttggtacaggatgccttagagaaggtgaaattgattcaggagcggcttcgcacggcatagtctaggcagaagagctatgcggacagaatcatgatgtatcttacatggttggggagaaggtattgctgaaggtttcacctatgaaaggtgttatgagatttgggaagaagggttagttgagccctcggtttattggtccgttagaggtaccttggagatggtttattgccacccaacttgttgagtgtgcacttggtatttcattcttccatgcttctgaagtatgttggtgatccgtcccatgttttggacttcagcacggttcaactggagggtgatatgacttaagaagtggaaccggtggctattttagattgacatgtccgaaagttgaggtcaaaaggacatagcttcggagaaggtgcagtggagaggccaaccagtggaggaggccacctgggagaccgagatggacatgcggagaaaatatccacacttatttgagactccaggtttctgtactcgttcgaggatgaacgtttgtttaagagggggaggatgtgacgacccgaccagtcgttccgagagttatagcctcatttcccccatttatgcttctttatgtgttgttcaacttgttgagttgtatcaagttggtaggtgtcggtccgaagtagttttggagtaaaatgagacacttagtctcttagttacaaagctaagttagaaaagtcaactagaagttgacttatgagtaaacgaattcggatttgcatttttatgattcagttagctttgttcgtgatcttagacttaggagtgcgtctggaatgtacttaggaggtatgtggtagaattaggcatgaattaacgaaggttggaaatttgacaattttggtcggcagtggaaaattaggcatcggggccggaatggaattccgaaagttggaataggttcatagtgtcattcgcgacttgtgtgcaaaaatttgaggccattcggacgtggtttggtaggtttcggcgtcgttggcgaattttggaagtttaaaagttcttaggcttgaatccgaggttgatttgggtgtttcgaaggttcgactaagttcaggtagtgataaatgacttgttggaattattggttgaagtcccgaaggccttaactgcgtttcgaatggttagcggattggtttttggagttggtgaattgctgaaactactggtgtgaattttctagtatttccgcacctgcagatggggagtcgcaggtgcgatggtcgcagatgcgggatcaagatcgcgaatgtggaatttggccaactagtagttagcgcatgtgcaaaagtgttgtcgcacctgcgagcccgcaggtgcgaaggggggaaccacatgtgcagaaatgagcggataagtgaaatatacaagtgcgctcctaagaccgtagatgcggttgcgcaggtgcgaatatggggttcgcaggtgcgagacccctgggcagaaactatataagccacacttcgcgaaattttgcctattcttcaccattattggccggttttttagctttgtgcagtgaaatttaagggagaaacaagagatatcagtgaggtaagttacttgagctttattatgtgtgtttataatgatttcccatagtttagtcatgaaattggtaggaatttaggtgaagttgagggagttaggtcttgagttttggagagtttgagggaccaaacggagtcggaatttgatgaattttatatggttagactcgcgagggaacgagctttctagttctgaaatttttgacaggttttgagacgtgggcccgggttttagcctatttcggattttggcctatttttgtagttttcttgtgaaattcatttttagcctatgttgatagtattgttctgattatggatagattcagagcttttggaggccgagtcgagggacgagggcatcccggagtaggattttacgctgttaaggtaagtaacatctttaactctggttttgagggtataaacctagagaatttgatatcatgtgactgtttggaggtgatacccacgctaggtgacaggcgtgtggggtacgccgagggattgagacttggtccgtctcgtgaggctgtgaggcataatagccattatatgtgttttatgtatttacatgttgtagaacttgactgccttcatgatagagatcatgcttaggctttattcatgctcacattatttgtactcagccatagaaattcttgtacatgtttacctcagtctatattatcttgctgatacgctgtaatacttaatttgggttgtgttcccttatttgttgagaattgtgaggttagagaggtacatgacagcgtgaggtcgagggcccgttgtgagatgtttgatatagcacgtgagttgtccgtgcagatctagattgtactatagtacgtgagttgtccggatggatgcaaatatgatatgatagcacgtgagttgtccgtgctacacttgagttgtctgtgcttagcgcttgggctgtaggagcccctccggagtctgaacatcccccagtaagcgcaagtacatattgagtgtgtgcattaagggctaagtgatagaatgacattactatgaggtttcattttcttttgatgttgctgcatttacctgctaattgccttgtagcatttgctgatttatggaatttacttgcttactcatgtttatccttaattgtgaaaagaaataataggattgttttgcttagctcttcactactactcagttccttagttatttatgttactactgattcgattgtactcatactacacactgctctttatgtgcggatccaggtgagttagggcgcggtgatcgttgagttcaggccggttatctttggagactgcaaggtagatactagcgtccgcaggaccttgttactcattttatcatctatttcttcttttgggttgtattgacagtttgatagtttatatatcctagttcacagatttagacgctcatgacttagtgacaccccgattgggactcatttttctgcttttctatttttatatttagagtcggcttagtttatgagaaattcaaatattggatatgttttattaaattcttataatcaaatatggtagcaatgttttgggaaataggcttgcttggtatcacgataggcgccatcacgacctgggttaaatttgggtcgtgacattccaattcatctaattttacttaaggcattgatgaaaccgctcctttgttgagattgtattgaagttaagtttttcacctctcaatttttgtgtttttcgagtaacttgatttatattttttagttgttacttttaaattctaatattcgataaaaagtaatatacacatatgagtaaaatttacccgaggtaaaatttaattactagataatagaaagttagaataaaataacttgattatagaagttgataactttatatcactgcaagatttggaaacctcgtctctaactggcaattgaattatgatggagatagctcgtttatgtctcttaatgcttaataatatatatattatgtgtatttgtgtgtatgtatttgtatactctatgcgcatttgtgccttgcttcaccaggaactaattcattgtcaaccacttaacacatcaaactctagcttgtcgcgccagtgtctcagcttataaatgttcaattgtaatttgtcaattgctgacagttactagagatggcaataaggcagcgacatttgctcaacagttaggtactgcctaagctgcaggacaaaaacgagataaatgtcaagattgcagacttttaggccgataaatcgcccgataatcgtccgataatagctaagctgataccaatccgcacgatatcttatcgggtggctagaagattaatacatttaaaagacaataatcgataagccgaagtgttaagactaaatagccgcccgcgctgcccgataagtagccctaaggcaaaactaatgtgctgattttatggcaaacaaatgccacaaacatgaaggagatttgcaaatttgagacgacgcacagaaagaaaggaaatttattctcttagaaaagagttgatgaaagatattggagactttatttaattttttcattgtaccaaccccaaaaaaaagaaagagaagaaccatcaattgattattgtgttccatataataagggtagtgagtcatttatcatgatattatatcataggtagctaatatgattctacttagtggttgaacgattttctagtcatcttgtttttctttattttactgcaaggtcatcccgagtgagaacctcacgatccagcataggctcctgctggatttgaagatcacgaggaagcgaaaagtaaggattatgagtggtctacctaggatcaagtggggagctttgactaaagacaaaacccaagaattgagtgataagttgctgacaatgggagtatgaaagagtagtagggatgcaggtggtatgtagaccacgactgcaaattgcattagggaagttgcttgagaggtattgggggtctcgaatggctcatctggtggctgctaaggggattggtggtggagtggcaatgtccagggcaaagtggaaaccaagaaagcgacatatttgaagcttttggagaccgtggacaatgaggagaatgggacgaatagggagagatataagatggctaagaaagaagcatagtcggtgacaacgactaagattgttgcgtttgtacgcttgtatgaaaaacttataggcaaatgaggtaataagaagttgtacatgctagccaaggtgcgagaaaggaaggcctgtgacatgtaccaagtgaagtgcatcaaggacgaggaaggcagagttttgttggacgagacacttattcgacgaagatggcagacttacttccataaactattgaacaaaaaggtagataggaacattatgctacgcgacttataacactccgagagtcgtcaggactttggatattataggcatataagagtcgaggaggttgagggggctatgttaaggaggggggggggggagcgaccggtccatacaaaatcctggtagaattttggaagagcatagtagggcgggcttggagtagctcatgagttatttaatatcatttttaggatgaaaaatatgcccaaagaatgaagatagaatatgatgatcccgttgtataaaacgagagcgatatctaaggttgtaataactatcggggtatcaagttattaagccagactatgaaagtctgggagagggtggtggagctgaggctgaggaggattgtgtcttatttacgaattccaattcacatttatgccgagacattcaactaccgaagctattatatcttgttaggaggtttatggagcaatatagggaagaattgacatatggtgttcatcgacttaaataagacttgtgataaagtgccaagggtggttatgcgaagatatctgaggctataagtgttcatgttgcatattagggttgttaaggataatatgatggagctaagactcgattgaagacagcgggaggggactcagaatacttctcaattgtgatgtggttgcactaagggtcagcccattcctattttccatggtgattgactcaagaaccacattcaagtggaggtaccgtggtgcatgttatttgcatataatgttatattgattgacgatatgtgcggtggtgttaacgagaggttagaggtttgaaggcagaccctagagtataaaggtttcaagtagagcaagaccagacagaaaacttagagtgcaagttcagtggtgcaactcaagtagtggacgaagacatgagggttgattctcaggtcatacctatgagagaaagtttcaagtaccttgggtcagttatacaatagaattgagagatcggtgaggacgttacgcatcatattggtccgggtggatgaaatcgaggctctcttctggtgttttgagtgataagaatatgccacgaaaacttaaatgtaagttatatagagtgatggtcaaatcgactatgttgtatgggacagagtgttggccagtcaaaaactctcatgctgagaagatgaaagtggctgaaatgaggatgttgagatggatgtgttggcataccaagttagatataattagaaatgaagttattcaggataagatgtgggaggcgagacttaaatggttcgggcatatgaagaggagagacacggatgcaccggtgaggatgtgtgagaggttagacttagagggcttgaagagaggtagatacaggccgaagaagtattcgtgagaggcgattaggcatgatatggcaatgctccagcttattaaggacatgaccattgctaagaaggtatcgaggttgagaataaaggtaaagggttagatagccaagagttgtccttgtttgtaacagtagctttagtacacgacttagtgtcatttgtgtatttttatattccttaacatgtgttattagttgttgttgtttttgtttcgattttatgattgcattatctaattttaatttcgtatttttgcagtgatttactgattggtgtgcttgttgttgcccttctttttatcttttctaagctgagagtcaactgaaaacaacctttctgccttcttaaaggatgtaggagcccctccggagtctgaacaccctcagtgagcgcaactacctattgagcgtgtgcactgacggctgagtgataaagtgacattgttgtgaggtttcatttacttttgatgttgctgcatttacctgctaattgccttgtagcatttgttgatgtatgggatttacatgcttactcctgtttatccttaattgtgaaaagaaataattggattgttttacttagctcgtcactactactcagttccttagttatttctgttactactgacttggttgtactcatactacatacttatctttatgtgcaaatccaggtgagttagagcgcggcgatcgttgagttcatgacgactatctttggagactgcaaggtagttgctagcgtccgtaggactgtattgacagttagatagtttatatatcttagttcataaatttagacgctcatgacttagtgacaccccgatgtttggggctcatttttccgctttctatttttatatttagagtcggcttgttttatgagaaattaaaatattggatatgttttattaaattcttataatcaaatttggtagtaatgttttggaaaataggcttgcctaatatcacgataggcaccatcacaacctgggttaaatttgggtcgtggcattccaattcatctaattttacataaggcattgatgaaaccgctcctttgttgagattgtattgaagttaagtttttcacctctcaatttttgtgttttttgagtaacctgatttatattttttagttgttacttttaaattctaatattaaaaagtaatatacacatatgagtaaaatttaccaaaggtaaaatttaattacaagataatagaaagttagaataatataacctaattctagaagttgaaaacctttcagataaagaaaaaaatgcacaaattaatttattcaatgcccttgcccttattttttagagaaaaaattagcttaacatcatacttggtacaagttttattacttatgagaaagaagaaaaagggaaatattgatattagaatgaaaattttcaattgtcactaacaatcacatggctaggcggttttctttattttttgtaatgaaaatcttatactatactttttttcatggataataatatttgttaagaaaaattaactataaaaacaatattattgaataaaaaaaggggtctcaaaagatggggggcccaaagccgttgctttagtggcttgaccctccagcccgccctgcctcttagtgctgcttattgaagattttagatatttactgtaagtggatgaagccactatcacacacatctagaacggcaaattaggggtattcaaaatcgaaccgaaaccgaaaatcgaataaaaaaaagtagtttaattgcttattggtatcgagttaccgatttaacggatggggaatgtattgaaattttattattaacggcttatcggtttgtgggcgaattattcatttttcttatcggataaaccgttaatatatatatatatatatatatatatatatatatatattcccttccacaattctttcctatcaacgaattattgatttggaaaccttgtctctaactgacaattgaattatgatggagatagctcgtttctgtctcttaatgcataataatatatattatgtgtatttgtgtgtatgtatttgtatactctatgcgcatttgtcccttgcttcaccaggactaattcattgtcaaccacttaatacatcaaactctagcttgtcgcgcaagtgtctcagcttataaatgttcaatgtaatttgtcaattgctgatagttactggagatggcaaataagacggcgacatttgctcaacagttgggtactacctaagctgcaggacaaaatcgagataaatgtcaagaatgttgccttttaggccgataaatcgcccgataataactaagctgataccaatccgcacgatatcttatcgggtggctaacagattaatacaattaaaagccaataatagataagccgaattgttaaaagtaaatagccgctcgtgccgcccgataagtagccccaaggcaaactaatgtgttgattttatggcaaacaaaagccgcaaacatgaaggagacttgcaaatttgagacgacgcaccgaaagaaagggaatttattctcctataaaagagttgatgaaagatattggggactttatttacttttttgactgtaccaaccaaaaaaagaagaagagaagaaccacaattgattattgtgtcccatataataagggtagtgagtcatttatcatgatattatatcatatggtagctaatgtgatgatacttagtggttgcacgatctgttattcttcttgtttttctttattttactgcaaggtcatctcgagtgagaacctcacgatccagcataggctcctgatcctggatttgaagatcacgaggaagcgaagagtgaggattatgagtggtctgcctaggatcaagtggggagctttgactaaagacaaaacccaagaattgagggacaagttgctggcaataggggcatgaaggagtagtttggatgcaggtggtatgtggaccacaactgcgaactgcatcagggaagctgcttgagaggtattgggggtctcgaatggctcatctggtggatgctaagaggattggtggtggagtgacgaggtccagggcaaagtggaaaccaagaaagcggcatatttgaagcttttggagagcatggacaatgaggagaatgggacggataaggagcgatataagatggataagaaagaagcatagttgatgaaaacgactaagattgttctgtttgaacgcttgtatgaaaaacttagaggcaaatgagggaataagaagttgtacaggctagccaaggtgcgataaagaaaggcccgtgacctggaccaagtgaagtgcatcaaggacgaggaagacacagttttgttggatgaggcacttattcgacgaagatggtagacttacttccgtaaactattgaacaaaaaagtggataggaacattatgctacgcgacttataaaactctgagagtcgtcgggacttggatattataggcgtataagagtcgaggaggttgagggggctatgttaaggaagggggagcgaccggtctagacaaaatcccggtagaattttggaagagcatagtagggcgggcttggagtagctcactgagttatttaatatcatttttaggatgaaaaatatgcccaaagaattaagatagaatacaatgatcccgttgtataaaacgagagtgatatccaaggttgtaataactatcggggtatcaagttactaagccaaactatgaaagtctgggagagggtggtagagctgaggttgaggaggattgtgtcttatttaagaataccaattcgcatttatgccagaacattaaactaccaaagttattctatattgttagtaggttgatggagcaatatatggaggagtttacatatggtgttcatcgacttaaataagacttgtgataaagtgccaagggtggtttccggagatatatggggctatgagtgttcctgttgcatatgagggttgttaaggataatatgatggagctaagactcgattgaggagagcgggagggcactcagaatacttcccaattgtgatgtggttgcactaggggtcatccctcagcccattcctattttccatggcgatcgacgcactcaagcaccacatttaagtggaggtaccgtggtacatgttatttgcatataatgtagtactgattgatgatatgcgaggcggtgaaatttaaaaatttactcgactcaattgtccaaatataagtcttctatagaaatatatttcattttatccaattcatttaagttatctattaattttcttaaatagttataagttttctttccgcggttaattttgttgtataatgtattaattgacatgcctttacaaaataaaagaatagtacactagtaaaattgtctctttatcacttctttatgttaattttatttatttattaatctactcatgtactgatcatgatgatgtccgaataagttattgcgtattttaattatttatatttatattttaatcacaaactcttgaataaaaataaacagtgtctttataatattttttagaagttatcatcaagaagttggtgagatgtataagatttctttatcgtgaattaattgaatttgagtttcgaaaataaagttttctgcctagtaaagacttctctcgttttagtagaaatttaatttaatatgagttcaacgggccattgagcttagaattattataaaaaatagataattttagcaattattgtctacaaatatatttgggagaaataagacacaaattatagcatgttgttctacaatctacaagattattgcaaaactccttattaacatactcaaaaaagcagtggactacttagtagtaattctcaatatgtttttattgaatggatgaccattttggataatgtgattgtggcacatgcgtgggtaaaaggatactaaagaaaaaggtttcctcttagatgcattatcaaggtggacataagaaaagcttatgacttagttgaatggagcttcttaagaatgatactactagagtttcacattccttttacaatagtgaacctgatcatggcatgtgtcaccactgtgagctatacattgttgatcaatggaggcatgactccaaagttctatgcaaagaagggactaagacaaggagaccacatgtctccacacctctttgtcttaaccatggaatatttgaatagatccttaaaataactgagacacaattcaaattttcactttcatcgcaagtgtgccaatagagaattaactcacatttattttgaggacgatctattgatgagttatagagatgataagctctcaattccaattgatgatgcaagctttccgacatttcactgaagtttcaggacttaaacaaaatttgggtaaaagttctattcacttggatggagtgtccgaggaattcaaagcaaaaatcatctatgattggcaatcatttcttgagagctatcactcaagtacctaagggtaccatttcttttaagaaactaactatacacagtatatgcccatggtggataagatcgttgcaaggatcaaaagttggacaacaaggttcttgtcgtatagtgaaagagtgcagttaattacaaatgtgttgtttgagatacaaacttactgggcttgggtcttcttcctgccaagaaagctactagttatgctcactaaaataaacttgtgatgacccaaaaggtcatcttatgtaatttaagccttatatgtgttccgaggctccgagagcctccgttagtctcatctcgttatgcgtgcgcagcccgggcgtgtagccgggaagctattatgtgaaaagttgatgaaaaaaatgagttttgataattaatgaatgaatataattgactttggtcaacatttatggtaaacggacccggacccgtgattcgacggtcccggagggtccgtaggaaaatatgggacttgggcatatgctcggaatcgaattccgaggtcccaagcccgagaaatgaaattttaaaagaaattattttctgaaaataataaaggaataagaaagtgaataattatgtaaaaacagtattaccgggcccgtattatggttccggagcccggaacaggtttattatatactaattgtcttatttgtaaaatttggtgtaaaacgggcgtgaattgagtggattcggatcataatgaggttttgagatttttaaaagaacttgaaatgtggcatggaaagtgatgtgatgttccgaggtccgagtgagattccgagaccgggaatagtttcgtggtgtcatttataacttatctgcaaagtttgaagtcattccgagcaggttaggccggttcgatgatttgaaatgaattctagaattttaagttcttaagatttgattaaataagttttggggtttgattcgagttctgctgttgtttttcgtgttctgaaagttcgagcgagtccgcttagtgatttaggacttgttggtatatttggacgggggctcgggtgggctcaggtgcctcccagaccccgcgcgaggccaaaaaccagcaaaaaccactgctggtgcacaacagctggtgtggccacatgtgcggttgcccagccgcaggtgcgggaccgcccctgcggtcccagcctcgcaggagcgatcccagtccttttgcccagattccgaaggcgcgggactcatcccgcgggcgcggtccaagacctcgcaggcgcgggatttcccgcaggggcgactaaatccccgcaggagcggcctccgcaggagcggatactttccgcaggagcggatactttccgcaggagcggtttccttctagactggcccaagaccgcaggtgcgaccatttttccgcacctgcggtaccgcaggtgcgactaattttccgcagatgcgaaaatcgcccagttaattctaattcctaagtccaaaacagaacacttgcgggtattattaaaagttcagcccttcctccatccccaacctccattagcgagccttgagtccatttttcctcccttgttactcgggtaagcttcgtaaccttgtgtttgtccaattaacatcattaatcactagaaacctaggcctaaactcatgaaatcaattaggaaagtggggtttttgggtagtattaggtttttgggatttttgggtgattcaaccccaatttggggtcgaatcttaaaacaaattgtatattcttaatcgtggggttatgggtgaacgggttttggtccgaacctcgagtttagaccacgtgggcccggggtcgaattttggaaattttgaaagaaaggtgggaattgtgtatttaggctatgggatagtattattgagtcgttattgatacacttaaattaattatgcttagatattgtggttccggagttgaattcaaaaggaaaggcggtcttagagggccgattgctatattttggacacgaggtaagtgtcttgcctaactttggtgagggaataggtattatttgctatgtgctaagtgaatatcatgctcattgcataggtgaggtgacgagtacctatgcaatgtgtgtcgagcatgcccgtgagtctattttgatagaaagtgtagtattacttccatgattaatatgttatgaaattgtctttacttggtaatctattattgattgggaatattggctattgagtttgagaagtgttgatacgaatagtaaagtaagtgtagaggacgtgattgaggtaattggttatagctgagacctttgccgggcatttcttgagttactacttgatgtttcccccttgccgggtggtttgaattgcttatctaccactatgctgtactccttgccatttatctgttattgtttggtgaggaagagtgtaaagcacgaagggtgatgccgtgtcataacacttgatttcattgcatagtgaggaagagtgtaaagcacgaagggtgatgccgtgccatgattttattgattatacgcacgaaggtaaatgtcgtgccattgattcattgtacattgcattgtgaggaagagagtaaaagcacgaagggtgatgccgtgccatgattttattgattatacgcacgaaggtatatgccgtgccattgattcattgtacattgcattgtgaggaagagagtaaaagcacgaagggtgatgtcgtgccatgataattgatttcattgcattgtgaggagagagtaaaagcacgaagggtgatgtcgtgccattgtttacttttccgctatttatcgtgttccgttgtcgattatattgggttgtttctctggattactcctatctgtcggtgtgactattttattccatttgttcccctttttactgttcctgtatcccctacttgctggttatctcatgctttgtgttatttcctgttacctgctgtagaataggacaggttatcgttaatgttaagtctagcctcgtcactacttcggccgaggttaggcttggcacttactcagtacatggggtcggttgtactgatactacactgcacttccttgtgttgtgcagaccctgctaccggaccccgtggagcattctgagggagataccttcagtccacgtcagagcttcgaggtatacactggcgttcgtggatcccgaagcttctctcctttatcgtttcattgtctttcttattatttccaagacagtgtagtattttcatttccaaacttgtatttagtattccagtagttagtccgtgagatcgtgacaccccggttttgggattgttcgttgtagatatcttatcatttcattttgagtttttctaagatattgtaattatttctctgctgtgaaacaattgaagggatttggaagactcagtaaagttttgagagttactagtgtgggaagttttacgttatttaagtttatcatgtctttattcttcgcattcttgaagttttcgctatttctattaagtaatgattacaagattttttgttgggagtttgttgaaagtgatgaaccatcgtttcgctcagtattaaatgattttaaattactattgcaagttatacgttggctgtcctagcgggttcaacgttgggcgcagtcacggcccaaagggtgggaatttgggtcgtgacaaaactcaaaggagaattctttttattggccattgttttattttctaatggtcaatttcagccttctaaattggaacttgcagaaaggttgagatacattggaacaatgatccaaataatctttaatgttttgaattagaaaatgcagccaaccagattgtgtcaacatcatatcattagggccactttgtataatccgatgtcttttcttcaaatggccgaactctcacaaataatgcaatactcttgaaagggtaatctagaaataaaagagtcatttttattttcataattaatcgatttatatgctaaaagatcacatgtataacatttttgaaaattatctttttggtttgctaatgaatgaatatattacgctcggtgtctctcgagcctcctcttgtaccaatgtctccgttttagggtttaaggaataaggtaatgaaattcggtatggacttttgttgttgttacgacatgcagagagcagtgccctattggtctaattcctgcttccccttggtatcggtaatggggctggtaagaagtaggaaaagatgccgacactgaatagttaaagaattctccgtcgcttcaagactgccagcctattcgctttatagttactaacatctgtaggaccttcctgtggacatgaaacacccaccactccaggaagacactagttgcatgggataaattttgcctgtctatatctgctgaggggaccaatattatttacatcatccgatggaatataactgctatatgcaaactactactagcagtaacattgaaagaagatagactatagatacgatggatccatagaatatacataaagacacaaaatctcatgcaaatgaagacaccacaacaagctagatgaccggtaaaaaaaatttgtgaagcaagaaagtggctaactgaagctggagatcctaccacaatgttagacggtataattaataaaggcagatttaacatcaaaaaattctacaaatatcttaagcctcaatatgaaaaagtttcgtgaaaaggttaggcactggttaagggcctactacctagacactaattcatattatgctttatgtccagaaaagattacccacaatagatgaggtgtgcaagtctattagggatgtgtactatgtggtactgactccgttgaagatatttatcatatgttcttctcctacccatactcaaacaacacgtggaagactatacacgttgggcaggaataacaaaatcaattgaaaactgggatgaataaatactatagcactctaggaaagttaacaattgcatacacatattgggattcctttttgcagcaacagtctatcatatctggacagaaagaaataggcccaaattcaccaaccagaaaatggaaagcaagagcagttacatataaaagggcagaaaaatcacaagtggaaaaaacaattaaaataactaaacaattaccctgtatagattctaattaaaactagtgattacatagaagaaatgactccttagtccaagtgagtcatcttgtacatattgaattacttggttacataaattttttgcagttaaaaaagaaagaaagaaaaatagagtaaagagggtgaaaatctgaagctactttcgtgggggaactttaagtaatgaaagaatacttttgggggtaaacgaatacatttatatcctcaaaagtccaaaatgccaatatccaattctccatttctcactcacttctaatttccacatctacaaaccaccacgcaaatacagacactacaaagtacaaactgagctagctagggtttcactttccgagcttccccgccaccgccaccgccaccgtctatggccgaagtaatggacgttccggcggacggcttagagcgccgccgtgaccgtgaacgaagcaaagagaacaattccgtcgaagatccgccggcatcttctccgcctcctcctcctccgccgccgaggcgcggccgcgacagagattcacgggaacggagagacgacagagattttgaccgccgaggtggtcgtggggactattacgaccgtaaccggtctcctcctccacctcttcgagagcgggagtacaaacgtggacggcctagtcctagccctcctcctcctcttcctccttatcgagaccgccgtggtggatattctcctcctcaccgccgttcgcctccatttccaccttataagcgctcgcgtagagatgactatgatggcggccgccgtggaagccctagaggtggtttcgggcacggtgatcgaaggtaagtcgtaaagatttcttacgtttcatgttctctgtatatgctcgtaaatcttcttttagatcttcaataattagtcaaattagctaaccaataggagttgtacctagtggttaatgaagtaggcagtgaactatgaggtcttagtggaggcaaaaaaacactatgtctacctaaggcttgctggacaaaacaaagttgtttggtaactgtgtttgtgtgttggtgtgagatagtaggtaactagtgtaatagtaccctcataaagaaggttggatttgaggtttagttgttgttgctgctgtagctaagtagtaggaattacattacataaataaataagtggagacagtggtggaaccaaatatttaacataggattcgaaatatgcaaacctgcattgtgagtgaatacacctaactatggtgggattttttttgataaggttactactttggggatataacaattcacatcaacaacaacaaactcagtgaaatcccacaagtggggtctggagggtagtgcgtacccagacctctaccttatgagggtagagaggttgcttttggtagaccctcggcccaagcttataggacaaataaagcaattggccatgtaataacaaagaaaatacaagaatagtgcccaatattaccgttaagaatgacacacgccgtaccaacaaggaactaagaatagtaaaataagactagtactaatactgcttaacaattcacaatttcacatataaaccatataaatgaaaatatttgtttttaccctatttatatagtgtgacttttccacaagggggattcaattgaaaaaagcatataatgaattatgagttcaatccatcttgtttaacagaaagacgccttgctcattatcatacaatcacttattcacaaactttatgtggggtaatagttttcatttcccatctcttcgaaaacctattaaaatgggctaaaaatggaagagcattatcggggagaaccaaagtgaacttcaacttccgttccccaaactgttaaaaaaataaaaaccatccttttgtgctttccacgggaggggtacaatttagatgcatgccaaggtttcaaacaaaagggaaatgaaattttgatccgaatcccatctttcgaccaattttttggaaattatgtttctgataattgcacaccattattagtacatttaatatgcatttctctatttgaattactgcaaatcttcaacagcacacttctatctgccattgggtataggggcagacccaaatgattcaccgcatttcaaagctgaaaacaacaaatttctgggctacaaaaaaggagaaagtagaaggaacacttactaaaattaacatggtgatgcacattgttggtttcagtgtgttagattagtgtatttcagctggaattttgtgggatagcataacgatgcaatatagtatactttccagggcgttgctcatttttattaaaaacttataataaaaatgtttaaatgctggcaagggttgcctaagttgggtttttgcgagtttactagtagaatgtagatgttattatgttaagctggaaagtttagcttctgtgtggttccagttttgattggtagtataatgttcatattatctgtagttcaaacagcagcaacttcatcttaatcacgtcatgttggttatatcaatcctctgtaccgttccactctctttgggtcatttcattcaaacactcgataatgtgttatttatttgaagactgacagaccttttatttagtttcacatgcacagttacatgtttaagattgattcatttatgtctgtcttccctagcgtacatgttgaggtgccatcattatgtatgtaaacgtgattggaggatagggatattaatactgctaagtgctaacacaaaaaaagatagatagaaatactgttagcaagtcacgtatcggttatcactaagaacttgcttcaatttgcagtgtagatctcttaattttaccggaagttcaagattggactctatttgtggattctcctaacattgtcattgttattacaattgaggatgtcataatgctgcacctgtacatggttgcttcctccctttttgccaaactttcattgcttttgcctgtgttcaagcatctttctttggccatagttgatatcatgtttattttctgttgtatatggatggcaaacagccatttcttattcccatgtgctaatttgcaattagattcaatagtttgtttggagctgtttttcttgcattgaatgatggatttgttgaatttaattagcggtgaaataagtgactgaatctttacgattgaatggtggatcatcagttagaggaatagaagtaactaaacaacgatatcactatagaaggtgaagagttcgatcttttggtgaaatcagaaatttgcgtcttttgttggtcttcaccctccgggacaccttggtttgtgaactttggtggtaaacactggtcttactgcctgatctagaatgattggcagacttaccaatggttgatcattgagcatctaaggcccgtatcatccacaagacgagtcctgctaaaatgtggatgttaaggtgaatgcgtgggcatacaatatttaacaagaattagaaataccatatctaacagaaggaacaagtagcacaaaaagagaataaaatgagacaagatccacagagatgggttgtccatgttcttttagacctccaaaagcgcatgtcccgaggtgggccagtatgatggttgaaggtgtaaaaaatggatgcggtaaactaaaatcaaatttagagaagtttcaagagacctactcgaaatccatgtggatataatgaggaacaacacacaatagaaccaaaagatcaataaaggggatacccactagttgaaagtcatgttgttagaggtgggcgttggtatgctcatttcattttttctaatttcagttagttttgttcacgacttcaagcttttcaaaaatgggcttcttttgacaaaaaagggcttccatgttatattttcgggtgctgcttgtggaatcactatttcttcggtggaacttttccttaagttgggtcatttcaagctgacgaactgattataagcggctatagcaagataattgattgacaaattgtagtgccaagaatactaggtccttcaggataattcttgtccattttcttgcaagtatttttatgatggtgctgtcaaaatctttttgctattgcagatttggttatgactatcaacccggttatgagcgtgagatggggggtagacctggttatcctgatgagaggcgtcacggacgattcgcaggccgctcggctggtggctatcgaggtggtcagtttcattaatattttaccctcttagagtactggctttcagtgggcgtgttaaatgtgtagtatttatgctataataagtttataagtttattttgactaatatgtagtttaaagcacgacttatgtatatccattgctttatcgggtaattagaaaattatgataagtcaaacaagttacgtcttgctctttactttgtcatcttagagtatgtttgactgtttgggttagctcaaagctcgtcaaactagcttttaaatactttattggcttatttttgtgcttggtaaactccaatagtgcttttaaagcaaaacaagccaaaacaaccaaaagcggcagttaaacttattatctcttacatgtttttataattccaaagcacccttctctcgctaaaagcccaaccctgctttctttcttttccttcttccctctcacattgctagttcctttctttctacttggctatatactgtacaaccttagctaaattgttgacttcctgaatccagagtttttgataaattcacataatttgatcaaccttgaagttgtagctcagtcatttattaaatgaagtaaataaaagcatacataatagaacttgtagccttactttcggtgtcaagtgcaaagcctggaagagagaaccaccttcctttatgggtaagtcgagatagaaagtgccataagtacaactataagactgtgagatgaatctaaactattaggattcgatgattgcatgggagatactttatatctaaaactgaaaaattgatattgcatattcgcaagggttgacagtgtaaatgtagagaatatgcgaaaccgaagtgataactatttgttaatgatattagtaatgttgaacttttgtttttctatatgagtttcttttgcactatttaagtatgtctttaaatttttcttacaagctttagtcaaattattaagtactatctctgtcccagtttatgtgcggtgtttgactgggcacgaagccactgattcttttcatcttgtctttagtcgagggtctatcgaaaacaacctttatgccctcctagggtaggggtaagatctgcgcacactaccctctcccaggccccacttgtggaaactgactgatttttttttggttgttgttgtttgactgggcacaaagtttagtaaagaacgaaagacttttgaaacttgttgtctaaaatgagccataaatctttgtctgactataaatcatcttattaaggataaaaggcattttaacgttaaattgtcactaaatatagaaagatgtcattcttttttagacggactaaaaagtaaagagtgtcacataaattgggatggaggaagtatgttatttatataaataatttatgtttattaatgcttatgtttattaaataatcttatccaaattttttataacttatgaattgaggcacaagttaatttgtggttgaattgatttaaaattaaagatgctgcaattacacgctctttttttgtattaacaaccttaagggcatttcagtcattttaagaagaaaagtattatcgtcactcttttaccaaatacattaatggcctagtttcagtttcaacacttttatctaaacaagtaaattcttattcatatatttagctccaacacttgaagaaagttttcaaacacttggtgctaaaaaactacttaaattcaaaatcaaacaggctcttagtttaaattcccgtataatccactgatgtcgtaaacaaacttgagggagaaaacatcaataaatttctttcagttacctatccccccaaaaaaaatttgagggagaaattcttatatttgaaccgttttgatatactcttttaggtacattggttaatgtgcattcagctttcgttctaagattttaagccagtaatattattcacaatcaagtaatttgttccaaaattttgtggcatttggcatttctagggattgacttttgacctatatttttttgctagactgggggaaaggccggggaggatttgcagatactttcggcacggggagcagtcaaaggtacgagtttgtgtcattaaacatttctctttccattagtctcatttgtgcctttatagctccttgcaacttctataattgcaaagaggcaaccgttttcccgcataacttccatctagttaactaagtcccagacattccacagtgggtgtttagtctgcagtagcgagctcagctgcatggagaatgctattctcacttgagtgaaattgtttgctccatgttatctttgtcatgtcacattttgctcgctaaactttttgatctggtttttatttgggcatcaagaacgtaacaagaaaattgtgtttgttgagacttgaggtatcttttgcttgtctgcttagatggaaaaggaaaagtttactaataggaatgtgggtggttacaacttataaaaggctaaccccccgccgcgcatgaaaaaaagggcctctttttagaggcctgtagtttttccagaaaaacacagttcgtaaatgcggtcctctccctcattaaatgccggaggattagctctcgggcactttctttccttttccattcaactaaatagtacctatatgcatcagagtgtgtgacttaagaaggattttgtgattttcttttagtttaattgttctatgaaaatgatattgcacttgtattgtttcatctgtttttcttaaaaaacatcaaagcatttggtttgaataattgatgcactcttttgaatatgtcacagagagggattgaagtcttataagcaattcattcaggagcttgaagatgatattttgccagctgaagctgagcgcaggtcagaaaggggaagtcttgttctttagatgtttcagctaagcttaattttttggcctctggtataacttgcaggttttttgatttgagtacactttttctcttgtgtatatgtaaatgtgtcgctgtaaaataattgagctatttctccttgtatgcaggtaccaagaatacaagtgtgggtatatagaagcccaaaaaagagcttattttaatgcacataaaaatgaagaatggtacacttacagctgtcctagcttcccctgctatctgtacttgctgcagttctctaatagagttttttttgtctatgcaggttgaaggacaaataccatcctacaaacttaatttctgttattgaaaggtaagctttgatgccattgtatagaatttttgttgggagagctttggagatgctcttgtttgttacttggactaactgcttttatacctttcacctattgttctaaccaagtgtataattctggtcctattaatctcttcctttctgtcttaatgtcctgtaggaggaatgagctcgcaaggaaattggcgaaggatttcctacttgatttgcagagtggaactgtagacatgtaagatctgttgttctttgtatatcgatgtgcatgatgaaataatgtactgctaactgaagtgattcttctttgcacaaagtagaggtcctggtgttacacctgcttctgcaaacaagtcaggacagtcaagtgacccaaattccgacgaagaagccgatgaaggtgggaaaaggagacggcatggaaggggacccactaaagaaactgatttactttcagctgctccaaaggctcaccaagttagttctgatcccagaagagtccagattgatgttgaacaagcacaggcacttgtgaggaagcttgactcagagaaaggaatagaggataacatattatctcgatctgataatgataggggaagcagggacaagtcgcatggttcctctggccctgttattatcataaggggcttaacttcagtaaaaggtctcgagggaactgagctgcttgatacgcttctaacctatctgtggcgcattcacggggtggattattatggcacgacagagacaaatgaagctaagggtcttcggcacgtgagagtggatggcggcaagacttctgatgctacaagcagtggagcagaatgggaaacaaaactagattcgcattggcaagacaggctgaaaggtcaggatcctttggagctaatggctgcaaaagaaaaaattgatgcagctgctgctgaagccttagatccctacgtacgtaagattagggatgagaagtatggctggaaatatggttgtggagccaagggctgtacaaaactcttccatgctgccgaatttgtccataaacatttaaagttgaaacatcctgatctcgcagtggatgttacgactaaagtgcgtgaagatttgtacttccagaactatatgaagtaagtgcagtacacagtagtatctttgttttttaaccttctttatttttagtcacaaggctaagggctttaaatgatcccagtgatgaaaatgctcctggtgggactcctgtaatgctgccatctatgccggtaaagcatccatctctcctttctttattttattcaccatttcgtgtgtttcttactttgcatacaagtgtttgaacctcttcaattctctactccaggtttcttctcatactttttctaatatgtgacttaagtaatgctgtggtgtccagctattatgtcttgtgaattttgctgcttttttcttctttacttcatgttcaagaatctcagaaaaacaagctggaaggtgttgtcacggtaattttgtggtcgactgtaatagaggattttagtgccgtgaataacaactgctggcttaggtgtagtgtcattagatgtttggttaacggtattaaaagatatatatggtgtatagtctgagtggctgctttatttgagttagatacggatttttctctagtaatacctttgtcccaaatagagtgtagtgtgtatggaggatttatatagctcacaccaactagtctgggattgaggtgtagtttatttgcttattacccattatcttatgcaataatataattagcatattacaataaagagcttagtcagatgtaacattatcaaattttttattagcttacataaagaacaaaaagcaatttaaaatgaagtatactaacttaacaagataaatgaattataaatgtttcattcctcttctaagcacatgaaaataattttcgaaaaccttcttgtaatttaaataatgccataaaacactactagaagaaacaaatgagagacaacaagtgatggttaaaattccattaataacacgaaggatgctgttgtaaatttccaaatgcctgattattaaattgtaatttgataccgggattattttcatctacaggagtaacgaacgacccctttgaacttgtccaagagacgaagaacttttagattggaatccatgaccttctatttaggcgtagctaatgatttaagcatttttctacatgatagatattgtgatactggatatttaagtcgcaactgatagtcttctagaaacttgttatagaattgctaggctggaatctatgatcctctatttacataaaaagctagtaaatatagcctgttttctaaattatatctaagcttttcaacattcttcagttctctagtgtcctgacggaaaagagcatggaactgaaatcaaacttctaaatttagcgtatcaaaattattggaaacatattgttgttcccagggctttggttcaatggtaaaggtagtacaatagaaagggtggtaggcgcacctcatgagttgtgaacaaccaggtctggaatttcagtggagaagggcagagaaatgggctcatttaccactgagttccgaagctagaaacgacggattcctcggttattgggaaaaccatatactgattgccctggtggtttggacaagtgtgcatcagtacctcataatattttaaactcactgataaaatttctaacaatggtgaagtaaatgtttgatttgtccttgtgttcataggagtgtgcaaagagttgtttggatgcaaaaaatcccatcacacatcatcccagccagaaaattgatgattgcatgtttgaatcctaaatattgcctccacatgatggcagttagtgatgtttaacatgaatggtttaacctgagtaatttggtctctgacgtatttattgctgcgataaattcataccagctagattgttctttttgttgttagcacccgtattatgatgctaagttccgctatttgtcatctgtgtttcaatgctgtttatctttttttttgtattcttgcttatgtgatcttggcgcattgtcctgaaggagctagtccatttttatatgttgattcgataaggaaacactgtgatctcatgtatactcagtcctctttttatcatatttttcaatctgtgatgattttaacagcatgtggatgctatgcagatagagaagccactaaggcgccggcctgggctagatggtcgactgaaggatgacagagggagccgtagagatcgtgatggtcgagctaatggtggcgaaaggtttgatttgtctgacaacccgaaatctggggattttcaatctaataatgatggtgccagtgggggaaatcctgatgaagaaatgtttgatacttttggtggacaagggattccagttgcttctttcccttcagacatggctcctccgccagtgttgatgcctgttcctggtgctgggtaacttaaaatgattctcccacttgttatattttcaaaactaggtctctgctatgactagtgtatgctattgaatttttgattatgcattttcattgcaagtgcagtcctcttgggccctttattcctgcgcctcctgatgttgcaatgcggatgatgcgagaacaaggaggccctggtccttttgaaggtggtagaaatgggatgtctgggcctgcaataagtgggggggccccgataattgctttacctcctgcatttcgacaggatcctcgtcgtttgcgaaggtattttgtgccttgaagtattttcagattgattaatggtgaaactaatacttaccatgattcaaatgtcctatttcactgaaatctgtaaaatctagtcaattgtgtatttggcactgtgtttgtacagcttcagggaaattggtttctatctggcgagaagacacaatatggttactccaagtgtcactattgtattttgatgacttgtagagcacaccaataaaatctagataatggctctttggataggtttgatgtaagattacaatataggctttgcattgccttgtttggtgtctagacgcactaaaaacaaccaggaaatagaagggccgagttataggttgtgtgagtaagggcttgtatcagcttataaatggctcctggaaagtgcgtagtttattgtgctaaaaatggttgtgagcttcatccgcattgatacaatgttttgttccaactccagcatattgatagataggtcctaaccattctaaatttgtggtggctcagattctactttttgacgttttttatattgattatctcctattttcttggttacataacgttctgagataatgatgtataatttaacgcttttagctgtcttccccttactctctagaacttcccgtgcatgttttacgccttgtgatgtctgttacttgccccgaataagattccttcttaaatgttcattttggtatgtggttttaacttatttgatatgttctttttttggtaatctagaatctggttatgtagtatacttatttacatgtgttttctaagtctaagttaatctttgtatctacttttaaaatatgaaaaattaaaaaatttgagatacaatgtacactgctgggttctgcaaaggggttctgcaaaggatgcatcgtataattgggccttttagaggatgaaagaaaagatgctgagtgtgggatattgctccatggaccattaacacttatgtaggtagtatggagggaaataaatatgagattttcttgaatctaatgagcttctgttttttttctgatcaagcaaagtgtaattttattgatgaagggaaaatgtggttcctatttgtatagaagattgggtgtctttgcagagaatcatatgtttctgtagattctctgttttgtgtgcacctcttgtatacaggagctttaccattatcagtaagattatactttacttgattaaagaaaaagagaagaattcgatgatacttagactgcaagatacttatgctacgacttggagctactgcgttgtttatgcactactttgaaaaagcaattcttgtgactactggctactagacatgagggcacatgttcaagataaatcggtgtaagctggctcttctgtgtctgtagactaggttgaagtggagttttgatcaggggttccatgttgagaagaataaagagacagaaaaaaggagacaggtggagtccagtttgtctaaattttcacctcttctgcttatgttctcaaggcaagattgggaatcaagaaaacttatttgctgctcaagtagatggaggaatgctataactaccaaagctgagttatttctggaaattctcggaagctgttttcttacctcctgatctgctagctctatttttctttgagagttgcaattggacaccttttcccaaaaagtaaccacgcaaaatgaatatgcctaagtaccagtgtgtcatgcatttagttaatatagtaacctacatctcctgttaagaacgcatagggcatcactctacaatgtttttaaaatgcatctgtctgtttctgtgtaacacatgggatattttgtggatgttgaataggaagtcgagttagatatacaaggatttacaaatagcagcattttgttggtgttacatatgctggaggcatctgaatctaccttcatctatgttgctcgagcagctaatgattatctggttatatcttggtagaatttttgttccattcaaggaatttctaccctaatatgtagtggttttgtttttgaataaaagtgtgactgacctgaatacatcttttgccatttcgtgatttattttgtaatcagacactatacttgctttctttggaaagaaaactatccatactttattaatctatactgacctacatctcaacaattttgcagctatcaagatcttgatgcacctgaggatgaagttactgtaatagactacaggagtttgtagagtagacatggagaatggtgtaatatttcttcaagtgggtagaaggcaacctgcattgatgcgcatacaactgcgttgatgtcgaagcaagtgcgggtacttgaccgtcttgaagttatgaggaaccaactgcatcgacatgcatagttggtcttttagttgaaagaaaacgtggtgggggctggatgttattagattttcttggtgcagtagtacttgctagctatttccaggttctgcatcagcgtttaagctcgcagaatttccaatttttttctcctccccacttgatgtgtggtgaatttaggaactttgctgataagaacttgaaatgagagaattacaaattactaagatatgtaaaatatattttgtgacgaaagttgtcagttgtgccttcggggacatccaacaaaactgggactagagttgtcagtttgtttttggtgttgcataaacttaaatcgaagaaaaccatgtagctgttgagatttctgataacgtggagcagttaccttgattgtgaatgctcttaggatctagtgtttcttttattttccatagccaattattctgttatgatctgttattttttttctatcactgctgcaactttgctttccttgagcggaaggtatatcaaatacagtctcaacattcacaaagtaggggtaagatttgcgtaaatactaccttttcagactttcactcgtgggattatattgggtggtttgctgttgttgatcttcccaaagagaaaaaggtgtgtccaatttgtaagggttttatgaatgcgagttatcggagttacttggtacatatcttggcagagttaggtgattttttctcatttcttttggtggacagatttgttcggtatctgtattggtagaaggtggcagatatccgataggatagtggatagtgaggtgcacaagtactcccttcgtcttcctccgattcataataagtgaccagtttacctttttaatttgattcaaattaagtgtccatttgtataatcaagaaagaattcaatttgtttttacaaaataacccttatgtacatatccctaaaaagtttttttactcctcacattaaatagttagttagaggtaggttagtcatagtaggtatttttgtatacaaatagtattttcttaatgggcgtgttaaaagcaaactggtcatttattatgaaccggatggagtaataaataatatgagaatttttactatatcatccctaattattataattggtaaactaactttgactattataaatttaaaatgttgggaaatgataaagggtaaaataggtataagatggtaaatttttcattggttttccaaattggaagtaaaagtagatatattatactcagtaacaactcaaaaaagaagaaaaacaacacaaccggacaaccccaattgtgcacgactcatgcaccacaattcctcatcatactcggtaacatttcctatgtaggatagtgattcaatctaattaaattcttgttcaacttcttgcacatgcttcctctaacgaaattttcttggattatcaatctaataattgtattagctgttcagcacttgaacccgtgacctcttggtattacagatgagtcttctccatggaacttttgtgtactggccaagcaattgtagataaatcttcttggtggagaaagaatcacatgaaacgagatcttttttagtcattcctgcttcttcaatgtagagtttggctttgaataccttctgtatcatccaacaggcttgtttaggtattttatcccacattgactcccctttcctataatacacatgaatctactttaccctaaggatatctttcttttattctcctttcggtttcggttaccccactgcccccataaatagataagtaacacaggtcgcgatgacgttcaacactattgtcaggcaagttaacattaatctactagcgagtttcattttgttttaccaaaacctttccaacatttacttaatttaaatttaagcaattcaatagtaacggatagcttatgcaattctttaagctgagatggacaaaagaagtcatgatttaataattacattccaaaagaatagtctactagcgtgtgtgccaggaactagtgtcacaagtctacatgcatctagtagagtaaaaccaaaagaaatgaaagtctatcctactgtctgggaaaaatatagacagaaataacaaaagaaggctccatagtgctgctgagggtcgtcaagaaaagcagctcaccgtgaagtctaaaccaagtataaattagggacgagctccggactgatacccagatgcacctgcctcagaacctgtacaattaagtacagagcgtatcattagtacataaaaaatatgtacccagtaagtatcccgcctaatctcgaagaagtagtgacgagaagtcgacgtgacacttactatggccaaaataatatgttttaaatataaggctaagcaagaatgacatttaaaaataagtgataaagacaggagcatcaaaatttcttacaattaccttcatgtgtcaagcccctatcgtacagattacaaattttatttttcaggatattcaacagataaatgaccacagaacaccaaacagttaacaaacacataacatgccgtgaacgtacagccgatacgacgcaataataaatgtgcactgccgaagggtcgaacgactcaaaccatagatgcatatattacactgctcacgaatcgaacatgcgacacagttaatataatagtagggctaccccgctcgcgaatcatacatgcgacgcgggcaccctatatatacacataattaacagaaaatcaggaatttagtagagaatattcttacaaggaagaactaataatctaaatttcgaaatgtaaccttctagatgttcacttagtaattcaatgacattggccaacctaaattatcattaagattataaatacgacacataaagcatgcttgtgaatcctaaactacccgacatgatataatagtagctacgcacggactctcgtcacttcgtgcgtgcgtagccccacacgaataatagcatataattcgttatattcacctacgaagacaattttctcttacaaggttagaaatgagacttacctcgtttcaagcctacttcccgggtcaagaatgcgctcaaatctccgaattggtcgcccaaaaaatccaaactagccaaacattatataaataaatcaatctatgctcaaaagtccataattctcctattgaatggttatctcaacctaatttgcaaaatcccaaaatacacccccgagcccacattctcggattccggaaattttcaagggaaatagttacccatggcctaaggatcgatgctatatagtttttgcatgatttcataacaaattccttggtaatttcccatttttatcaaaaatctaggttttactctaaacccatgatttttactaattttatgtgttaatctacccaagaattcaagtattaaactcactttatggtaggaattacttaccttacgattgctaggtcgaatctcccctttgcaagctctccaaatcatccaagatgaagaaaagtggttcaaaatgactaagtcccgtattttaaacaacctcactgccttcaggttcttcgcacctgcggctcgaggaccgcacctgcaagaaaaatctcgcacctgcggaaaatgggaaggggccagtggtcgcgcctgcggaagggagtccgcacctgcggctccgcttttgcgggaaatggcatgcacctgcggaactgggcaaccctctctgaggccgcacctgcggctggtccttcgcaggtgcggtcgcaccagatctggtgcaccagcagttcttcaaggctggtttttgcctcgcgcgatgtctgaatggcatccgggcccactcgaggctctgtccaaatataccaacaagtcctaaatcataatatggactaactcgagccttcggaacgtacgaaacaacgctaaatctaaaaatcacaccccaaaacctattggatccaacttaagaactttaagttcttaaatttgcttacaacacgccgaacctacctataatacttggaatgacaccaaattttgcgagcaagtcataaattacataacaaaactacttccggtctcggaattccatttgaacctcgataacataacaaaaagttccaaacctcaatttttgaacttaaggaatcatatttcactatttggcgccgaaacgctcccgggtcatagaaaacctatttcgaacatacgcccaagtccgaaatcaccatacaaacctaccggaaccttcaaatatcgattccgaggtcgttaactaaaaatattgaccgaagtcaaacttagcctttaaggccaaccttaaggagctaagtgttcctataccattccaaactcctctaaaccccgaaccaaccatccccgcaagttataaatcagtaaaagaaactacgagaagtctcatttaggggcacggggtcctagaacactaaacgaccggtcgggtcgttacattcttcacctcttaaacaaacgttcgtcctcgaacgaatctagaatcatacctagagtgctgaataagtgtggatatctgctccgcatgtcctcctcggactcctaaatcgcctcctcgactggttggcccctccactgaacctttacggcagaaaccctcttggatctcaactagcgatcctgcctatcaataatagcaactggcttctcctcgtaacccaacctctcatctagctgaatggtgctgaaatatactgcgtgagagaagtcggcgtggtacctccggagcatggacacatgaaaaaccggatgaaatcctgataaactgggaggtaaagcgagctcgtaagcaacctccccgactcgcctcaacacctcaaatggacctataaaccttgggcgcaacttgcccttcttcccaaacctcatagtacccttcatcagcgaaactttcaacagaaccttcttgccctacataaatgatacatcacgcgccttctggtccgcgtaactcttctgtatggactgagctgtgcgaagcctctcctgaatcaactttaccttctccaaggcatccttcaccagatcggtgccatacaacttagcttcgtcaggctcaaaccacccgatgggagaacgacatcgccgaccatacaaggcctcaaatggagccatatcaatgctggactgataactgttaatgtaagcaaactcggccaagggcaagaactggtcccactgccctccaaagtcaatcacacatgatctgagcatgtcctccaatatctgaactgtccgctccgactgcccgtcggtctgagggtggaatgcggtgctgagctctacccgggtgcctaactcactctgtactgctctccagaaatgcaaggtgaactgaggacctcgatctgatataatggacacaggcacaccgtgcaaccaaactatccccgaatgtagatctgggccaacctctcagaagtataagtagtagctactgtaatgaaatatgccgacttggtcaacctgtccataatgacccaaaccgcatcaatcttccgcaaagtccgaggcaacccaactacgaagtccatagtgatgcgatcccatttccactcaggtataggcatctgctagagtatgcctcctggcctctagtgctcatacttaacctgatgccaatttagacatctagctatatactccactatgtccttcttcatccgcctccaccagtaatgctgcctcaagtcacgatacatcttcgtagcaccaggatgaatagaataccgtgaactgtgagtctcttctagaatcctcttcctcaggccgtcaacattagggacacataagcgaccctggagcctcagaacaccatccttgccaatagaaacctccttggcatcaccctgtgacactgtctcccggagggctaccaagtgcggatcatcaaactgtcgagccttgatctcccccaataatgaagactgagcgaccacgcgtgcaagaactcgacggggatctgaaaggtccaatctcatcaagcgattagccaaggactgaatgtccaaagctagaggtctctcctctaccgaaatgaaagccaagctacccatattctccgctttcctgcttaaggcgtctgcaaccacattcaccttgcccgggtaataaagaatggtggtgtcataatccttcagcaacttaagccatctacgctgccttaaattaagacccaactgcttgaacaagtgctgcaaactgcggtggtctgtataaacctcacaaggcaccccatacaagtagtgcctccaaatcttaagagcatgaacaatccccgccaactccaaatcgtgcacatggtaattcttctcatgaaccttcaaccgacgtgaagcatatgcaataactcgcccctcctgcatcaacacacatcccaaaccaacgcgtgaagcgtcgcaaaaaattgtatacatcccagaaccggaaggcaacactagaactggtgccgaagtcaatgctatcttgagcttctgaaagctcgcctcacactcgtcgaaccatcggaatggggcattcttctgggtcaacctagtcagaggagctgcaatggatgaaaaccctccacaaatgcaaacatatttggaagctgtaaattcactaagatctgttccaataatacccactctacggagtcataagccttttgaatatctagttttagcatataccgtggagagatatccttcctcttataacctttcactagttcatggccacactttactcaattcctaagttgctcggacacgggtgcggatcttgaggtcggatctttcaagatgtaaattttaagattcaaagatacggatcctagtacggatacgggtgcggggattcgactaaaaataattaaaataaattaatatttatgagaaattttgtagaatatttacgtatagcttgttgttgttgttgttgttgttgttgttgttgttactacgtataacttgtaaaatgtggattttctttttattctcaagttgtagataagtaaaagattgatatcctagataagatatgctattttcttcaaatttaccctagttttagttctgatttggataattaaattgtatctcgtctcgcatttttctatccgtcgtgatcaaaatacccaaaatattttgatcagaaccgatacagatctcatacccacattcatactagtatcgtgccgacactaataaagtcattgtgctcaagccaaatagttgaagaatttaaatggcctggcaatttttgtactagtttccttcaggacaacacaacggagaatgatctaaaaagaaagggtcaagaactagtgtttccaaatgatttcacttttacacccaaatagagttaaccaatgactagtcaatcctactatactatacacttggttatttgcccatgtaaatgttcttcctcctgcgttcatctccatcagaccagcatgcagtggcggattcaagattttatataatcggattcaatcttaaaagtatataattttagtcgtaaaataatagttgtcaagtgggttcaaataaatatttatacaaagtttacacacctttaatcttaatttatacatatacacaatattttttttttagtgaagcggattcagttgaacccgctaaccaccacttgggtccgccactgccaacatactacaagaacctgctaaaatcacatatatttttagtaaagtggacaagtaaatttggacagagtcaatatatgacatgcgtcttttagtaagatttatataagcattggatttagcaatgattagtccatttttgaaatccttcgacatatagatcttatattggtttcaacttggccattcttgtaagaaaagatgaattatccaactcttttcctttttatatgatttttccctgtcatttttttggggtaaaagtgagcataaaaacataggcagagtcagaatttgaaatttgtgggttcagtaatctaattcttttaagttacttgattcttaatcaacaagttgtacataattcaataatttttttgagacaaatacagggtttggacaaaagttactgggttcaaccgaacgcgtatccgaagggctagctccgcccccgcatagaaaaggcacactatatagatgtcttctatataatgtgccttttctatgccggggcggagctagcccttcggatacggattcgattgaaatcagtaacttttgtccaaatcctgtattggagaagaaaaacaaagggacaattcaagtcaagaagaaaatggacaatataagttcaataaaatcacatatataaatttcctctgtttacaaaattattgcagataataagaactctgaacttttagctgctatttggactcatcttcctgtgtattagcttcagcttcttctggttttgatggagtttccatcttctcaagctttgccacccggaatatcgccaaattggtgtcccctatatgagaaaatcgacacatttgataagcgagtttaacttctatacactgacatgccagtataaaagaaattttaatcaatcaaatcacctaagagataattacaagcaactgtttataataaatcggattagtaccttggaaaaataaggagtgtaacttgctacaatacgttaaacacaccgatagcgtaaaagttctttataacgtaagtttcttcacttatgatatctcaacttcccctagatagtctcaatttttttttctcgtcctttttcgtccctttttacttaattttctaattatttgtcttgcctctttagccgagagtttatcggaaatagtctctctgccctcccagagtacgggtaaggctgtatacattctaccctccccagatcccacttgtgggattatactgggggttgttgttgtttacttatctaatggatttttaatgtttctcatatcatcaaagacaaggtacatcaaacattccatttggttaatgctacatatgtactccatattgaccattgacacatgttttcctcacaacaagctcacgttgtctaatgtcaatcatgacggagggcagataaaagagaaggaccgacatgcttctaagttgacaagcttccgaagaagatgtgcgtttgacactttagacaaatcccacgttataaagtgagagaaaaggaaagtgctaatataagacggagcacaagttcatagagtaattcgatgtggcatagcccaacggacaaatcaatgagattcgtcggaccaaagcggactatacaaacctaattaaggcgggtcaatcttgtggattctgggctaattaaccatattccctgatttaaacgaaaagggaaaggaaagaaggatacaacaacaacaacaaccaccatccagagaggattctcacaagtggggtttggggagggtaggatgtccgcagcctcgcccctaccctggaaaggcagagagatcgtttcctatagaccctcaataaaggaaagcagaataccgaaagtaaaaataggattgaatacagaagttgtaccaaatgtcaagagacttccaggtaatgcagcagcagccacaccaggtctaagcctcttctcgccgatgaacgtgccgttcgtgctgtctaaatctgtcactacgagatactcttccatgctttgtagcagagcatgtacagcagacactgtttgtacaacaacagatattcagctgcagaaactaaaaaaattcttggcgaccaacttataccttgactacaacaacaacaaacccagtttgatcccaacatgtgtggtctgggaagggtagtctgtacgcagaccttacccctacctaagcaggtaaagagggctgtttccaatagaccctcggctcaacttataccttgactaaaaggttaaattacatcgacagtacaaaaatatataagtaaaatccttccctaaaactactcaaaaggaggaaagacacaacatttcagttgagtttaacttctataaactaaagatacaaaaacaatcataccatcatatcatctaaaagataactaaaggtaattaataataactggaacaagttacttgaaaagtaaggtcgacgaccattttcaacaggttaaattacatagagtaaacattacttacacgatcaatttctataagtaaaattatttcggaaaagtgctttcattacctgtaggcaccggaatgaccatatctgctttctcagcaagacgtccgacagtaactgcaccctaaaccgtgttgcagaatttgcaattaacatacatggcacacgtacgttaaatggtgaatccaatgtcgcaaagagaattgtacatcataatacttacagaaggtatttcaagagagcccggttttgcagttggagaaccgatgtgccttgcgtctccatcacctttttccagcattgatgtattcaataattgatagtaaatcagaagttctaaactaaagggaacatgtatagatgataagatcacaaaaaatgcttaaagttcctgttgtcgttaaccatatatagagaattactatcttccaggtctagcaaaatctgtccgaaaccaatatgaaactcaccggagccgcttgggccccattccaaacatccacacaagtatatattcaccatatctagagattgctatactcatcccctgatccaaatcagatcctccacttttcatccttaaccagaggtctcgagttcgagcccctgggtatggagtcgcgtttgttacggagtgttttgccctcccaatgagggacttcccgacgtgaatccggattagtcggaccggataccgggtgagaaatcaaaagaaaagagaatgctatattctgcagctcagtggcgaagccaggaatttgctcaagggtgtttaaatttgaaagaagtgaaaaaaattcgccgagaaagagtgttcaatatatgttatatacctctaaaatctaatattttacttatatatgcagtgtaattttccgacgaagggtggtcagttgactaccctttataacatgtagcttcgcccatgctgcagcttataacacattcattatgaaagaagacaacaagtaacacaaattcagatccttgctttaaagcatcaactaggagcagtacatacagcatgtggttcaggggcgtacgcaagaatttttataagcgacgttgatatttacagaagaacgaagaataaataactttaatagtatcacatttctagataagatatagcgttagtgcatttattttgttgagttttaagttagacgaggttctgggtccaattctacttatctatactttttaacaagaggctctctcaaatatttgccaacaatagtttctacttgaggttcgtatctacgacctcttacaacaaaataaggcacttaaccagtgtactagacgatgatcggagtctaagtggtggcattttctcttgttattatttcccacagtattaatacatatgtttggtaaaattttccgacgaagcggtatcgcgtgacactgcttcgttgtccgcccctgtggttcacagtgatgaagtcacgataaaggaaacaacaaactacaagggaaaatagtgattttaatcttttgagttattaccttggtttgatccctacatattttttgactgagcatatttaccctttaactaaagagtttagcttctatgcactcccgcacagtggcaaaggtacatagttgaccacccttcgccgaaaaattatactacgtataagataaaatattgtttgttattgattaaaatagattttgaacacccttgcatagcccactggcaatgggtgttaaaaaaatttgaacacccttattgaatatcctggcttcaccactgcacccgcataattttttgcaccatcatgttaaaatgacctacgacgacatataatctctataataagcctacttgtaaatatcaaatatggagaataaagaaaatgaccagtaaaagcaatatactgtcggtgtatataaagttaaattcttaattaaaaaggtaagagtttggtccctaaagatttccttttatttttttatttttataatggtagtgtcggagctgcttatgcacattatttctttggatacctgctactacctacaagcatatgtacgaataattctgtccaccaaaatttaaatttagacgtataggaagaaacatctaacttttttctctagtgggattttttcatttccctttttttttattcaagtattagttctcgccataggtcacaggttcgagccgtgaaatcagccactgatgctagcataaggtagggtgcctacatcacatcctcttggagtgcggcccttcgtgaacgagggatgcttcgtgcaccaggctgttttttttttgttgtgaaattctcgtaaatttgatcccattaattgtttcccattctacaattcagcattagttcatgatcagaaacttctatagccagcccgatgcacaaactatccctcattcgtgaagggttcaagaaaggacagctcgaaccagagtcacaaccaggatttcaaatttatgggttcgggattttaattattttaagttagtgggttctgaattaataatttatacatattcaataaaaaatttaagacaaatacatggtttgaatcaaagtttctaggttaagccgaacccgcactcggctctctagctccatccctggctcgaacatgtgacttacgtacctaggtcacacagagacaactttaccatcgctccaacactctccttccctcccccccacccccaaaaaaaacaaaataatacaacatacctataaattcaagaagccatgtgactgaaacattagttgaattgctctcagccacagaagcatggatagctccaaattttctcagttgccttacactgcattttagttttgtgggtaaataattaaatccaagaatattaatggaattggaagaacaaagggtagctctagaatgaaacagagatgataattttggtggattagcataggaaacagactgtgaagttgtagttaatgccatctgttttttatggacttttttcctggtttttggttttgtgtgacagtacttatatatggtctgtggataaaattgctatccaacaaaatgtggcttacataaaatgctgtcaccaagattttggataacaaaaatcttgggctctaaaggatcgagtagaataatacgtactaccttttctcaagatttagagggtgtttgactaagcttataagttggtcaaattagtttataagcatttttcggcttattacgcgtttggtggagttaaaagtggttataagtcaaaaataagccaaaagtcataagtttgtcatccccaacttatgaatttttagcttatatgtttgaccgagaattttactattttatccttaaaatattcttttttagaacaatactgctacatcgataatcactacctcaagtattttttcaacctaaccctctccccctccgcctcttgaagtctataattctcattgactatttaagataaacaaattctctattcctttgcatatttgtatcaatgtaattatgtattaatctttgaactatatgtaataaataaggacatatcaaaattttggtgtattaatgttttctcttcaaatattttgtcatatttaggtttattttttagtgagaaacttttatcaatttattaattattataacttatgattatatgcttatcataaaataaattatatttatcataaaagttattttatctaattagcacagttgtatttaaaataaattgacaaatagaatattttgtattggattgatttggaatctaaaattttgaagaaattacgtcgttataagtgtaaatagttctaaggttatttaagtcattttaatagaaaaagagattatcatcactttttaatcaaatactgcaacaacttattatcaattccatcacttgtatccaaacacatagttgcttatttaataaatcaacttcagcactagaaagtgcttttcagcacctaatgcttatcatctattttatatcagctaatccaaacgggctcttaacttattatttatattatagaaaatagaaaaaattaagttaacattttaaacatgtaaatgttatctggcttattttactaggttatacgcagtggtggagccggaattttcatgaaggggtgtcaaaatataaataattagatacgtcgaaaagttaagggaagttaacgtatagtaaaaaaacaaaaataaaaatttatctagcaatatagtgtaatttttcggtgaaggggtgtcgcgttcaacgtggctcagccactggtaatacgcaggggtatacataggtcgggttggttcgaaattttcaattatcaaaccaaactaatggcgtcgggttcttaaatttataaaccaaaccaaaccaataaagtcgggttttcaatctcggtatttctcgattttttcggtttaatgtagcttaaaagagagcgaatgagaatagagggaaaatgaaatatttgagtttccctcctgacattgtcccatattggaagagagcttttttttgatgggtgaattgtcatttactggtctcatcttttacggaattgatcttttttgactgtacaagaatatgtggagctcagcatgtctggaagcacaggagaacgttcgtttgtataaaaaatattaccagtattcgatactaggtcattcatagcattactataccttctctattcattgcaggttggttatttgtcagcactgatttagcttacgatgtgtttggaagccctcagccaaacgagtattttacaaagagccgacgaggaattccattaataactggtcggtttgatcctttggaataactcaatgaatttagtagatcgttttaggaggccctaatgactatatatctaacctatccaatttttacagtacgatggttggttgttcacgacctagctcttcttctagttcttaaagagttaagaagagggcaagcctcgcgctgtcgtcatcgccgctcggctcggcttcagatttggtcaattgattgattaattttttagaccaaatttaatttttaatagtaaatattaacgtaatattattaaatatctgttttttgtaaacacaaaattaatattaaatccaacggaaaattaagtgtccgttatccgttatccgttttccgtttttgtaacgaaaaattaagtgtcctccacgttatgaattcccggtttattgttgcgtaaatagccatttacattatggttgttttacataaacaactcttctgaagtgttgcacctcttcaatttgagctcaacattggctataaatagcagtcaattctctcagatttaatttttcatatgaatttctaagttctcctcctttcttctgcattgttttaactacaaagaaagcaaccataagtgtgttttgctatcgatttttgtgttcgctgaaacattgaggtttgaagtattgctacaccggtgaataattcgttctatcttgagagaaaataatccacaaccttgagtactaggaggcttgttttaatattttacttatctatactaacaatataaataacttgtatacttgtattagtgcgcattctcatgtcgtggtaagttaccaaccttgtttttaagattattaattccattaataatagttgatttacgtttaactttctggtaggccataaatccaagaaaattaatggactgaagttgtagttaattacattcgttttttgggagaaattacagaataatcagatttacaagtgatcattaaaaaataaccattacttcaaaaagtaatcgaaatttagccattttttctgtaaagataaatctgaacaaaaatcttgttcaaaatccagaaaatactccagcataatatactggaatttcagtaaattataatggagttccaacaaagtatactggaacagtataccggtccaacataatatgctggaagttcatacataggtgctcgaatctccaatatattatgctggaactttccgcgtgttggagttccagcataatatgctggaagttcatacacaggtgcaccgaactccagtatattatgctggaccagtttctgttgcagcaaaatagtggctatttttcaatgactcggcaaacgctggctatttttgaatgagcagtccgaaaattggctagcccgtgctattttttactcgtttttgatagattatacgaccaggaggttacgagtttgagccgtggaaacaacctcttacagaaatgcagggtaagactgcgtactatagacccttctggtccgacctttctccgaacctcgcgtatagcgaaaatttagtgcaccgggttactttttttatgctttttggtttactctttttgacattacttaaatatggtctgtggaaaaattgctagagagaaaaaatgtggttgaggtttggcatatataaaatgatgtcacaaatattttggataacacaattcttgggctccaaagtgtcaagtaatatttcggatttatcttatattgatagacagcgtatatgaacttttaaataattttgtgatataatttaaaaccttaattccaatttatgtgatataattttgatacagtgtggagtttaagaaagatatgaaagaattttttaaaatagtgatcataaacatgccattatcctgatactttattaacttataagaatacacaaacagaagtgagtgagtcgatcaaatattcgaaatctaaagaataatcattattgttgatataagaccgtacatattgataaaaacaattgctatttatttgctgaatacgtaggtagattaaaaaactcataactatatatctctcttcgtgctattttgccattcaatttaaaatatttaagaaagatctcataatcactgcttgcaaacaactcttctcaacttaagaggcacctactcttactagaagtctagtcactgttgccgcaacggaactttaaaaaaagagtttgagctctttttttttgttgacctttagctaccgttgccgcagtgggactaccatagaaaagcccttcgatgtccaccccgtctcatattttgccagaatggtatttcctatcgatcaatgtcattcttcgtagtatacctgacaaagcggaaggtgtagccgcaatagcaacatttttttttagattcttcaatatatgtcttctccatataaatatttttctttttaaaagttgaatccacatgtctttcattttaaaacttatgtttgttttcacatatttggattatgtgtgtgtggaatgaaagatatgactggaactctggaagtattcaaataaagctttcttcttatcttgtgttttttaaataaataaaaataaaaagagtaaactgattacttactctatcaattatcaattatatatttataatcagatgcatatataggtaaagacatttttagagttagacactgagctcttaactctatttaaatgtacaataaatcgggaaataagattttcctaatatttttaacacgaagtgagtattaaaaaaaaaaaaaaatatatatatatatatatattcagacataggagaaagatgagtattttcccctaaattattttatttgaactttctttagagaaattatattggtaacaattagaaggggactgtcaatggtctatgatacaccataaaacgttgtggcagaatagtaaatatttttccatcattaaccaaagttttggggttcgaaccttcctgtctttgctagggagcgttttacttcaaaaataatttttttaacgcaaatccgaattaattgagttttaatgcaagtacttgtccatgcaggttcctcctctcccaagccttatgaatggcaaatggcgctagatttatcggataatcaaattgtatcagaatgtctacgctccaatattaaagaagagttaagatatctctttaatatcgggcgaaagataactctttccggtgctatgtttgacaattttattttccccttgaccttagatgaacacaagtatcagtggctacttccatcgcaaccgtaaacacaaataaaagacaaaaaatgtggtccatgacctggtctctctcagagagtacaatcccttgtctgcattaaaagatatttggagaataatagggagtacaatcttacaaaaggatacagtatacttcttaattaatgtcattgacttaaattgtacagtactttataattattcttctgcctatgtttccccatattggggggtgggaggggaggaattatgaaaacaaattccatttttaattcaccaaactcctaatgtaaattccttattatagtaattatttcttaatacatctaattctcgtactaattaattaaattttttaaaatatcccctttaaattttggcatagaatggtatgggttaaaatcggattgaggatcgcgtcgtgcagaaaaggatgttaagagcgatcgcaaaattattacgagtggtgtggtcgaggtcgaccagtgattgaatgaactgcacaacctagcgaccggtcgttgccgaggacgagtagtaaatttaggaataacgactagttttgtactggtatcttaagaggaaatattctatcgaatattctctctaattgtactttaggattttttgagaatatcccatataaatataaggaaagataagggaaaatgcatgtaatgttctatatgataagaacacttgtaataagataagctctcacgaaaaatacaaagaactacttttgaagagattcaaccttttgtggattatctattgtcatttccatcatatccaagaaagtgcacaatattctctcatattcttgtcattcatcattgtcagagaaagaaatccttcgctctattcaatattgggtgaatcttcctcattatttacttttattgtcataaaatgttattaaatacttggtgtttctttcttattgccgcacctggacactttcattgataacgtatttattctgttgtatcagtgttacattattcatccaagatctagagttattagctttaactaggattgactcttcttaataactgactaattagtttaaccaaggattattattttttggtcaaataattttggcgtcgtctgtggggacttccttgtcaaagttttagtttctttcagatctaaaaaaaaacacaaaatctcgtctttcccgcgtgcatagtctaatatggcaggtaacagagaggaaataatgaaaacagtagtcggtcttgctactaatctccaaagcaccatcaatgaggtaactggcacagacgaggaaaacgcgacgccaaacgcctaccccaggcagagcggttcacccctccctcatggcagcgtcacaacatcacacgaaaagggggcctctatgtccactacaaaagatgcaccaccagcagtggaaaagctgctcgaagcgtggttaacaagcacgatgaccagtatactcgacaaacccacccaaaggtccaacatggaagatgcgatagtttgcgtcgcaccatcgacacacgagcaacacaactttcctctaataataggtattgctcacaacgttaacgatgcaggtagtgacaccctcacaaccattttgagaaatatggaggagatggaaaacgagaacaaaatgcttcgcaaccaaatgaaagagcaccaagaaagagtagacaaaataccaggcgccccaaggctcttgccaaaatgtgacactgatcggttcgttgagcaacagtatagtgacaaagcgccatacctaaaacctttaatatgccaccatatttgaaaatatgtgacagtacaacgaacccctaggatcatgtgacccactatgtcaccgcagtaaaaggtaacgacctcgccaaagaacaagtgtcttctatattgctgaagaagtttggtgaaaccctcaccaggggagcgctaacttggtactcacatttacctgcacgttccatagaaaccttcgaggagatggccgacaagtttttcactgcccatgtcggggctaagaaagcaaaagcgaaggtgagcgacatattcgccatcaaacagtcgcacgacgaaggactaatgaacttcctcgcccgattcaaccgtgtgagaatgactctcccaaatgtatgagaggggatagaggtagcagctttccagaacgggttaaacaagagaggctagagggtggccagaaaattactaagccaactcatgaaatacccccaaccacatgggacgagatacacaacgcctactgcgctgaagtacgagccgacgaggacgacctcaatgcgccaactcaacggttgacctcagtccaaatggagtcgagtaaggatctcataaacgataacagaagggaccatgcagtcccacgccccacccgtgaaaggcaccaaccgtcaggtgcacaggaatcgaaacgacagtggcatgggaagcgatgcggcgcgttgggaagacgcgtaatgatggttcttgcagcagtgatgtcaccctaagatgacatcacaacgagttgtagttcttaaagcgccacgtaaccatctcatgcaagatcatttctactcaattccctctatctgaattttccctaactgtatgggtcaaaattaaattgaggattgagtcgtgcagaaaagaactttaagagcgattcgcaaaatcattatgagtggtgtggtcgaggtcaaccagcgatcgaatgaactacacagcctagcgaccggtcgttgccggggtcaagtggtaaatttaggaataatggctagttttgtactgatatctttagagggaatattctgtcgaatattctctttgattgtactttaggattttttgggaatatcccatataaatataagaaaagatgagggaaaaggcatgtaatattctatatgataagaacacttgtaaaaagataagctctcacgaaaaatacaaagaactacttttgaagatattcaaccttttgtcgattatcattgtcatttctatcagatccagtaaattacacaatattctcttatattcttgtcattcatcattgtcagagaatgaaatccttcatcctattcaatattggatgaatcttactccttatttatatttattaccatttaatgttatttaatacttggtgcttcttgcttactgccgcatctggacactttctttgatgacgtatttattatgttgtaacactatttaaattattcatccaaaatctagagttattagctttaactaggattgacttttcttaataactgattaattagtttaacgaaagattatattttttggtcaacaagagtaattcttattgtaaacttacaaagtcttgagattcttttttggggtcctatactccacaattttttttctcttgttgtttaattctttaatcatttcttaaggatgaattccaaagatatttcataaataagagatagaatgattatttatttctaaatcttcatgtttgaagctccccctccccacccccacccccacccccacccccctttgtttttgttagtttgataaaaggggggaaaggtagagagaaaatatatacaaatctatatgtatttagtacctaacaaattatactaatttaaggcgaaaatatataatcagtattagtaataatattgtatgtgaagataagcgttacatatttattggatttgtggaggataaacttttacgggaacaaataaatggggcaaattaaggactcatttgatacgggagataagagataattaatttttgaattaaatttgagataagttgatcctatgttttattggaacaaattacggtccggaattatattgttatttttatcctcgtggaaagatgaaaaacgaattccaacataaataattaatcatgggataacttaatttccaactaaaaaagtaaaaatagcacgaactagccagtttttggattggtcattcaaaaatagcagtgtttgcaaaggcaataaaaaatagtcactattttgctgcaacacgaaaagttctagcataatatactggagatcacctgtgtatgaatttccaacatattatgctggaactccaacacaggaaagttccagtatattatggtggaccgtaatattatactggaactctagtatattatactgaaattttttctgaattttgaacatttttttcattcaaatttatttttacataaaaaatacttaaattttaattacttttaaaattgtgctattttgaatttaaaatttatcccactgggagaccatgtaagatttaatattcccaactaaacaagcaaatgattgcataaaaagacttgctttttcccccttaatttaatgatgtttggtgttatctatccccgatatttctctctctattttctctctttttgccacgtaatcctctctttatttttattttttattttattttatttttgtttaaaaatgaaattacttaagcagctgacaccttagctatttctctcagtatttcttttttgtcaaactctttcaataataagtggatctcactgttcttgatttctttcttcactaaacacaattgggtttcttaaaaatttaatcttttttgttcacttataaaatttattttctcttaaagtttgaactttttgcattcccatttcagcttccatctttgttttatgggtttaaagttctagtcttggattttgtataatcctcatattttgtgtttctcaaagatttaatcttttttttgttcatttaccaaaaagataaatgaataaataaataaagttaagatttttttgaattcccttttcattttccagtttttttttatggttcttaaagttgtaatcttggattttgtataatcctcatattttgtgtttatcaaggatttaatcttttttttgttcatttaccaaaaaaaaaaaattaattaaagttaagattttttgcattcccatttcattttttagcttttttatggttcttaaagttgtaatcttggattttgtataatccataattaggggttggagttaaattttaaaaggtttgatcttgttaatttatgtgatttattttctggagttttaagcttattttcagcattttttattagttaaatttaattggattctgttatttcttcattttatttgagttttttttttgtgtggagaaattgagtagtgggaccacttgttccaaggctctgtgggctgcttcttcagctttctttattcaggtatcatttaatgctaatttttgtgtgataaaattttagtttgagctttttgtgtttactggttttcttagattttatgttacaactgttaattgctcagcataccctatttgagtatttttgtatttgttgaatcagtttacactatcatgatttaatttgtttctacattatgaaatatccatagaatattttgttttttgggggggggggggggggggggggggaatgggtgcttattggtgttaaactgttatgtgaagtctaccatgatctggtttctacattatgaaatattcatagattttatttatttatttatttatttttttttttggggggggggggggggggagggggtgtgaatgggtgcttattggtgctagactgttagtgaagtctgtaaattcaagttaggagctcctataacattaattaagagttctttcacattcattttgagctttgcatttattagttatggtgtaaacatcgcgtgcaagtaagtcgtcttaatgatttttaggttgaggtcatgctgtgcaatggaattaactggacatttttgtgcattttttcttagcagctaaatcgttgagtttgttgtatgctgatttcgaagctaaatgattggtcaatactgttggcgacttctttgttttagttagtatttttagacgttagcggcttctttgttctattcgacaactatgacgtatatgtttatttgcattggtcaaattagtaagttgttttatacacctaggattgagctcagagaatttttctgtggacttgtatatataccttattccttcctctatttccttcattttacctcaaagattcggttttgtcatgttattttggtagtaagatgagatgtggtcagggaattcagaatagattatcctttttcatcgtttatcttttaccttttctgatattgtgtgagaatgtatgtcaagcttcctttctgaagttggaggttcatttatatccatcgcgttctgtaatttcggcagttgcttgttgttgttatctatattactcggactcttcaaaaatattgttgggttcgtgtcggatcctccaaatttagtgcatttttggaggatccgacacgggtgcggcagcacttttgagagtccgagcaacataggctgttattttgaataaaaatcttacgtaaagccaagactttatttctttagtaacctcgacaggctcctcgtgaatgatgtcactccttttggacatgttgcctttatttctcccttgacttttataacaaacaatttcacatctcctttcattggcagttacatgcttttttttatttatttattatcgtttcaggctaaactgttggggcggactttttaacattttaggatatgagcatcacttttgaaactgatgacatgatggcatccaaagtagacgtggatttgcccgacgaagctactggtggagtaaatgccggtggaagtgaaccacttaaaaaaggtccctggacttccacggaagatgcaattttaatggattacgtcacgaaacatggcgagggcaattggaatgctgtccagaagcaatcaggacttgctcgttgtggtaaaagttgtcgtctgcggtgggcaaatcacctgagaccagatttaaagaaaggtgcatttactccagaggaagagcgacggatagttgagctgcatgctaagatgggaaacaaatgggcacgaatggctgctgaggttcatattatctttcaatcttttttctgtcactaatggttactgacaactatttccagctgtcttattttgctccatatctttgcttagttaataataaggcataaatgccggctgccttccccgtctttattaaactattatctagaatttgttaaaaatggctgttcaagattcggttttggtaaaagcatcattgtttcatatttaaatttctaaaaatacatgatttgtcattttccttaacaaacaacaacaacaacaacatacccagtaaaatcccaccagtggggtccggggagagtagagtgtacgcagaccttacacctcccccgaaaagggtagagattttcgggggagaggctgtttccctgagactctcagctcgacaaagaaatacggaaaacacatttttggtatttatttgggttttttgtaaaatcttcaaacaaaatctctttgctgctattttttctactgtgcaagtgaacttccatttcttaagttggcggaaatcgtcaaactgatttttttcaggtaaaatgattaagcatcagtttattgtcacattactaggaaataactggcatatttcatttgatgattttatttcatattaattcctatttaagtttgcgtccagcctaaattcaaggtcactgctaatcctgcggacgcagtccatatcttattagtacttattcacaactctttccagacaatgtcgagtagtcttggataagtaatccttatataagtatttaattttgatcaagtaattagtatcattttgatctgttcgtcctctaattgtgagtttctgctatatattttcagttgtgtcggggaatcttgatttgtgcaaaatcattttgaattagatttagcttttctttcctgtatcccctgtttgtaataataatatctcaaattctatcttttgttttcctttgggtgaacaaaagcttttgtctggtaaaaaggtgagaagtgtagttactaagtgcccgtttggacataaaatttgatggaagatttttccaaaaaaatttcgctttttttcgaaatcagcgtttgttcgtaaaatttccaattttcacttgaagatgcattttggaaattttcgaaaatttgaaaaactgcaaaatgttgtttttcaaaattttcactcacaaaacttcaaaaacaacccaaactgaaatttatgtccgatcacaactctaaatttcaaatactattttcacttgaaaaaaaatttcaccattttttggaattttacaattctcatgtccaaccgcctactaagtaatcaagagtatgatttcttcaacttcaattggatgattggtggtatatgattcattaattaacttaagttatgctctttttttaccttttcagttgcctggccgcacagataatgagataaagaactactggaacacaaggataaagcgacatcagcgtgctggcttgccagtttaccctccagatatttgtttcctagcaagtgagaacaaacaaaatgaggcgtcgggtgcattctcctctgcagatgcacaaaatcctaatgtctcgggaactaacacttttgatattcctgctgtagagttcaaaaatttggaactcaatcggctgttatatccaccaccactcgttgaaattccttctaatagcttgctcgatattactgtaagtagctttctcgcccagggtcatagtcctccctatggtagtacgtctttcctttcgacaatgcatccgtcaaagcgtatacgaggatcagaatccatattcttcggttcaaatggttgttctttgcttggtcagccctggggattttcctcatataataatcataatgtagcatatgatgatcacgaatcattctcgtgtactgtaattccgggcagccaagcccctttaaatggcaattcctcttcttcggaggagctcccttcactccaaaatcagacggcgaattggggcccgccatcttcccctcttccttcactagagtccatcgatactctaattcagtcccctccagctggaaacagtgaatcgggtagtgatctgtcgcctaggaacagtggtttactggatgctatgctttacggatcacaaactatgaaagcttcaaccgataactcacaccaagagaaggagacgtttggtgatgcagtcgatgattcttatggcgatccaatctctcctttgagtcatttctctgcatcagtgcttagtgaatatgcccctatcgacggaagctcatttcatgagttcccgtcattagccacaatgccaggtgagaatggtgaattttttggcttctccttattatttgcatagttaagtgtagtgtgtttatacttcatgtaattggattatttcttgatgttgaaggatgcaaggttaaacaagagaacgttgcgacatcatcagggcaagcttgtggacgcgattcttgtgcatgggatgccatgtccgctgtgtagtggatgacctgaacgcgattatggtacttttaaaagtttggttatctcagttataattatatgacagtggaaatacaatgtaatattttccatgaaccggaaacacttttgcatgttctgagcaatctaaagacaaatacattgatacttctttttatgtggcttaccggtagtattacatgttgtgtcattcgtgcgcgttaccttagtgtattgttgtcactattgtttgtgtcattcgtgcatgttaccttagtgtattgttactattgtttgctacttgttgtcttatctccatagtgcctaagctgagggtctatcggaaacagcctccgtatctttatgaggtaggggtaaggtttgcgtacacactactctccccagaccccatttatgggaatacactggttcgttgttgttctttttatgtggcgtcaaattgattgtagtttttataatataagtttaattaagtgacgtggtcaatgagaattcatatagccgacctcaacttgccctgaactgaggcgtagtttgttgttttaaatgaattgcagtttggtggagttgcagcatgtacttgtgtgagacagtaaattgtacttcatgcattactgcatgcagtctaggtgcatgaaatgagttggtgaaacatgaaagacagtccttaaaacctccttatttagcttctttggcaaaccgtctaaaatcggcttattttgaggtgtttaaaaaaagtacatttagtgagaagtattgtgtttggttaattactctgaaaaacacttttcaccggcaattactgtttggtcaagcttttgaaaagtacttctaagagcccgtttggacataaattttttttccttttttccaaaaagaattcgctttttttttttaaaatcagcgtttgttcataaaattttcaattttcacttgaagatgtattttggaaatttttcaaaaaatttaaaaactttcaaaagctgtttttcaaaattttcacttaattcatttacaaaacttcaaaaacaactaaaactaaaatttatgtccaaataaaactctaaatttcaaatattattttcacttgatttttttcttaaattattttttggaattttacaattcttatgtccaaacacctactaaatatagttttctcaaaagtgctttttaggagaagttactttatttttgcttcttaaaaattgcttctgtttttagtaaaaaatatttttttcttctaaagcttgtctaaaagtcaactttcttggagaaaaaaagtattattggcttggagaagcttggccaaacataaacgtatgttacaatcgttacaactataaaaacggaaaatataagggcttggcttaacttcactagatttgtcattttcactgtttgaatccgtgacatcttaatgacacggaggcattgcgccaaagcttctttttttttcaggcaattaatctgaaatggtaagaaaactttctgaattgttgttttcattattttaaaaaagaaaaaggaaataggtaagaaaaggaaactttttttttttttttgacaatggcttttgccttcacgcaaagtctgtctatgtgcaaatgaagctgcgtgaatgatttcctgcccgaaattctgtactttacccttcttttggagactaattgatgatcccttttacgtcacagctaatgctcgtcatttggaccaaatgtgcataagaataatgttgaatatgatgtattaataacgctttcattaattatgccgacatattttatatttattatttgatttgatatattaaaataatgcataatttttaaaagaattgtttgtttataaaaatacctcataacctgtccatcactttatcttttaaaaaacacatatgctgagaaatgtttttataagaaaaaaatttacgagattatttattttgactacctatattgtagtatagaactgaatatttttatttataaaaaaggaaatatgctaagtatttatttatctagattattaggcaaagaaagtttgaattaaaaaaacaaaagaaaaatgagttgattacaagtgcattccagtacgtagtagagtacaaatttataaatttaccatgaagaaattagcaaagtatagatataaataacgggagcaatttcaatatcaaactttacatcacttatattaatatactagtatattttaaatcaagggtacttttgtctttaaataagctaatgcatgcattaaaacctattgcattgttaacaccatggtttcatatgcattagttatgcatgagataataccaaatagggtgtataacaaatgcataggttcaaaaagtgtaccagacaaggcattattaatacacaaagctaatgcgtacattattttagctaatgcatcaaatcaaaggtatgaggtataagaaggtataagggtgatataaaaatttaataccgccttaataccctgtttggttagcaaatcaggtataagttattctggtgttaatttaacactttgataacttataccttatagaaggtggggtaattagcacatgtataacttataccttctttttagaaattatgcaattgtcattcttaatacaacataccaaacaatgaataaacaacaatcccagcataactaatctcagcataaattatcccaatataacttatatcgacataacttataccgatataagtcgtattccaaccaaacgaccccttaaagtacgaataaaactcaatgttattttaataatgcatgcataaatcttgggtaaaggtttagcttcagagaaattgaactagaggactatgtaaaatgtatattaaaatattaatctataatatacatatttttatatataatcaatgtatatttttcatacatttaactagcgaatataattatttttaaccgactgtccaaatatataggagcgggtcagggttatttggtattttaaaaaaagatacaggtagattttatttaatacatataatacacgtggcgggttaagaaaatgccacatggcaaagttaaagtaaaaaattgaccaggttatttctgttggaggaggcatttcggaccaaaaggttaatggaggatattttttagccattttcaatatgttaggagtactgttagcccttttccgaatgtaacataacgcaagaaccacatttggaataaagcaataactcaagactgaaataactactctattggaagtttggaacaaaaagaaacggggcaacaactgagcctcaactcaaaatcaacagaaaaagcaaaatatttctccctctatcaacccctcctcctgtctttacaatgaatgtaaaacaacaaacccaatatgttcctagcaggtggggtctggtaaaggtaatttgtacgcagaccttacgtctacctaatgcaggtagagaggttgtttccaatagacccaacgaatgtaaagaacacaaccggtaaaattttgaagctatgaaagagttacaaaattcccccgcaacggtccattgccatctttagacaatatgcaataacaattcagaaatttggtaataaaccagagaagaaagcatcctttttctacagagcagcacgtgtgaattacaaacaacagtatcctccaaattagggtaaaggttacaaggttatattggcaacagcaaaggcaatggctttctgggatcaagtcttaccctgaatagcctactgacaacccaacttggtgtcagtttgaaggttaaaaaaactcagtacgcagcaacttccaggatactggtattacaaacagactcatcatcgatatttcagaaactatggtacaattttaccttcctatcaacatttttcaacactgtcctccaatatacagaacaacatcagggttttctaactaaaatcaggtccgttgccttaccctcctgccagtgttatcaccaccgtctgaaagctgggcccaaacgcttctagactttccacctccactgctacaatcatcatcacaaccagcaacggttttaagaagctctgactgaagagaggggcagttttctttaaggtattcaaatccatccgattgcatgacagctgcgaaaacatgccacctaatagatgagagaagactaaagtgcaaagtaagcacacaaaaaacacctgcagatttccatgtctatcatagtttttaacatagaaggtccccaaatgcactctgctgctagttacagaagccgaagccaaactcccgaatggagcagcaactcatcaaacaaaatgctcgagacatttggacatctaaagggatatgtgcagtgtctcttttgtttttgataatcgagaaatccccgagggctagtcgcgtatggttcgaaactcgacggataatgagcccgcccctctactcctctccacttaaagactaggtttttctttgcaacagagtttgaacctttgactatgtgaagtgtgtgcctaacccacacaacacgccacgcttttaccactaaaccatagtcgtgggggctatagcactatgccacttttttaccttttggatcagttctataccactatcgcacttggtaacatgacttagtgagacttcttcccatttgatagtacgtgttcgcaattcagcaaattatctctcttcatcattttcagtttattcaccaaacccatattctcaatcaattttagcaataaatgtacaacaacaacaacccagtataatcccacaagtggggtcttgggagggtagtgtgtacgcagaccttacccctaccctggggtagagaggctgttttcgatagaccctcggcacaagaatgaaaagcgacaagagaataataacaatcttagcaataaatggtccctaccaaaagcacacaataacagaaccatgaaacatacgcccgacacacatttgaaatgccctaacttggtgaattccaaaatttaggacgtgggagttaaagcctctttggtggtaaaagaattttttcaacttctagggaagcacataattttctatctctttccacaaaggtagttatttttcaccagtttgggaaggggttttgattgatcaaaagaagaatctacttcaaccgatatgcccttaggcacggccatacataacatagaaatcacacttggaaagggtggacaattagctagagaaacgggtgctgtagcgaaactgattgcaaaagaggggaaatcgggcacattaaaattatctttgggaatttactcatgtaatttctggagttagaatcttcaaagaggcatacacccttacaaaccaaataagagcaccaaaaaaagagactacttgacacatatattacagtcatctaataatcaaaacatgtgtatggcagacagagcttcataggatctaattcttcaagtttgtccctcatagtcaaataaaaccaaatgtgattaagttaatagcagactgtcactaagtattgatgctttctgttttaagagtttacagatgcatggctaagtacaatacatctttcatttcagagaaaatcttattgtaattttatgttcatatgcagaaaactcatttgaattccaaagtaaaaattcattttcacttgagtggattccatgatgcatccattaatagctctagagaaaaaaaaagcaagctatcagacagaaccatggaagttggagtttgacagttaaatcagacttcttttggtgctgtgtggtgtgtggcttgagacatgaggtgcatggctgcatgtggccttgctggtgcaacaaaaggagattaatggacccatagacgtcctgttgatgtcaccgtcaggcgaacttgtgttcaacggaattgaattcggcatcaataacatcagtggcaaagatgtccatgccaaattcacgagaaccagttataacaattttccatccttacttcaccaggtcaggatagtgatcccatgtttcccatctctggatttctagatctcatagaaaatggataattgtctagtgggttgagaaccataatcttcgttttaactaaaaaaggttcgacattttgtgatagatgatgagaaatgacatatgcttcagtgatgcataatttctttttaattcttaatgttcttctaagtggattcaaacccaagctgaaatttttacttgcagttgtgctcgcttgacagctcgtacagacaaggctatgtaagagaagaactaactggagtacgcctggaacgacgaacaaggaaggagtatgagaagagagtttcgaaggtcagatcgggttggcttggctggtaaagcttgtgttctcaggttcaagtcatggcggaggcaaatatactatgtgatttcaccgtatttgtacaagccttggtgaacagagttacccgttacctgtgttggtgggaggtagcaggtacccgtgaaattaatcgaagtgcgcacaagctggcccgggcaccaccgtcataaaaaagaagtgaataggacggagattatagatactttttaaattatgggcttgttacattgtcttagaggtactgatcacatatatggcctgggatgacatgaagcttctttgtgtttgtaagaaaagggaggcagtgaagaaaaccaaagaggtaaagacagaggaatacttatagaaagaagtcctttataccaaagcctaactctttgataaaaatatctctagagaaacactagtgggagaaaatcccacgtaattgaacataggaatgaaatgggtccagatagagcgagatggatagttaggatgcatataaccaacacaagtagctgggaatgaggcatatactctgttggttgtcgtggtttaagatatcaaaagcagcttcaatttggtaaagtttggagcagaacactcttatcccacctgagggctgcatttttggattttcagtatttcccatgagaagagaaaagaaaaaggaaagtattcccagcaaaagaagaaagacttatcttctttgctcggtttatgtcctatcagacataaaatatattgacagcttcagtaaagaggcatagatcctactaaacaggttttggagaagagaagaggcaagacattcagtaaaaggacggacatggaacatggttaactatacagacaaagatagattcattagatactgtggccatgctacaagcctacaagtctactttacttcacagctgctccaaaagagcaaaaatgatgacaaacagcataccgcccaccatcccaaaaaagaaaacaccaaggacaaggcaaaatatacaaggttcatgctaaacaattatttattttcattttgtagcaatccaagacaaggcaaaatgcacaagtttcagttaagcagttcaggacactctgcagaagtcactgtagtgtatggacaagttgcaacaaataacatctctcatacctgcaagattttcagcggcaaatctaaggcagactgctttgagttccgtggcatggtaacgatcagctaaagcaagagttctggaaacagagttcacggaaatatctttgcaaatatgagattcacacacccgcctgagtcttgttaaatcataccgatcggctgctgctagcagttttgctgtcaatgtatcagtcacagaaggaatagaagaagaactagtatcttctagctcttcttctacaagagaatctctgtagatgaagtgcaacatagcctgtttcatgccacaagaataggatatatcaaagaaggcgagagctgagaatctcatttttttgttcaagagaattttaatcttttctcccaaaaaaacaaaagttactttggagaaacaaatacagcaagagagatggaaaaatgccactatctgaagcaatgaaaaatatcgtctacttcgacagcacaagaaaacctaatttaaaataaattgattaaaagaagtaaaaaaaagaaaaagatgttgatgctcactttgaagatcgtgggttccatatcggcgacaacaatctcctgcttatcaccatccagttcatcaaaaaattcagtgcagaatacagaagaacgagcagccaataccagcttatgggcatgaaatttttcgccagccacactgaaaacaacatcagagccttccatattttccaatagcatgccgaagtgtgatccaatatcagaatctggaacctggattggatgtaagctcgaacagtcaatcgtagatcgaacaactccaacagtgcaatttattttcaaacagtcatccttgagaaaatctgaagtttcaagcatcgctcgtctaaagaaacgtttgtagcccctgcataccacacagataaacaagtatagcaaattttatcttcagttgtaatagacaatatcaagcttaaagtaaaaggaaaaaataaagttcgattagggtctcctagatactagttctagtttgtattttttttcctttcacattaatgccatgacaaggaataaaaaatttcaagaaaggaaaaaacctaataatagagcatgtgccgtcaaggagatgcaccacttgttagcaagtaccaaatatagcccacaaataatgtcgactcaataagatgtctcaacattatgataactgccaacgtcttgatttgatatatggaggataattagtgttgtgcaccttgatgatcaggtttgactacattcaagcattctacctcccattcaattatccaagcgactgttatcttacatttttttttactgttatataacattatacatatggctcaagtaatatttctcaatttatgtagccagtgctcagcaagcatcaactactacatgcatacggcaactttggtaacagaaaaaaccctctcaacgtatcaaaacagtcaaatacttgagtagatcactttatccaaattactttaaaaggctgttcaccttgagctgagtcaaaaaataggactaactcaacctcaaaagttagctcgtgaaatgaggattgttctaaggagacatcccatttcgtcaaccaatgtgggacattctaacaacccccaacaaacctaggcctaagcatttagagcatgaaatatgtaaaatggggaccgaaattgggtaaactaagaattggaatgggtctagctgttataccacattacaaatatggacattgggcctaatttaaccccaaaagctagctcataaaattagcattacccaagactaacatcaataaatttatattacccaaccaatgtgaaacattccaagaagaccatataagaaggattgctgaagaaaataaggattgtcgaaggccatacaagaagacaacgactcattcctggaatcaatgtgagacattctaataagagaacccgcatcatcaaaaacatcgagtttgcgagagggacagagtgtctctagttgacccttcaaacactctctcacttatgagtcaaattctttttgtttatttaatttatgacaatggatggagtaacacaagacccttataaaacattttggatgccctttacaaccaatgtggggggttgtatacatctcaatttatacatgtttattcaatttatgtcttcacaattaatccttcacaaggcaagggtaaggcctgcgtacacactatcctccccatactccacttgtgagattacaccgggttcgttgttgttgttgttcatgttttcacaattattattagctatagtaactgacatttcaactttcactgccatgtggccctcctgtcaacacacatgtgattcatcccacattcatttacaccacaccacaataagagtataaacatataatggtaatacaatcacatgtgtgcgtgtttataaggacactaaaaattgaacaagatgataaaacatgaacagaaaataagaataaaaccaacttatcttgttagatattgttaaatgaatgttttatatgtctaagagaaacacagagagcactatagcacaacatgcatctcattgttactgattagtgtagtacccatatcaaggtttttgccccaatctgctcctttctcttctagtccttgtttttcatcctttaatcagtcatgtatagcttggaaataacagacgatgatgcagctcaattaaattaggaaatacaatggaaatatagaattatttttatttgttaactgaattatgcaaataggtcgatggggaaaatgaaacttcccaccttggaatagaaaaaccttggtatggaagtgcacgaacgtaattctcgcaacttccctctagacctaactgctatcgaagctccatctacaaatagtccgaataatgttgtatatatgcaggctccataatgttgtatataagcaggctccgtaagatccaatacaagcgaactagataaaatggaatcaatccaaattatagaatcacgacacaataaacccgaacgaacaaaatgttgaattgaatcataccggtcttccaaagagctcagatcgaatcggtatttcaaacgaagcatccaacatgctgcttaaacattaagataaggttgtattccaattatataactaagcggaacttgttatataatatttaaaggaagaaaaagaagtttcaaatcataataaagttctattagcctcatagctctcccctttccaaccccataatgtcttcatatcagaactaaatatgcaccgggtcctcaaattctgcccatcacccacatttcggctagacatatccagtaaaatcatactgttacttgtcaagataattgcaatttcctctcaaataaagaaaagcaaaacacaaactaacgtgctcagctttacttgcaacagaaagtctgcagatattatcagtgtccaccatgaaattacagaaatgcatcaaaatacttaaacacaaattttcagactttaaaaaaattcaatcaaactccgcatatggaagcttgccaaagcatagccggttctgaagctcgctataaaaaggagcgttacagcagatagacagtcagcataaaattatctaactataattagtcctcttaatactgaaccctgaataaagctgaatgaaacataattatagcctatcccaactaatttctcaagcaacttcacataacgcagaatttgatcattttgggtagatgccagaaggatagaggcgtacttactgattgcacaaaattccaactaacacaagttgaattaaaactttccacaacgcttataaatagtacttgcaacagcacaaatttcagtcttttgcataaatcaatagaatgacacaggtaaacacaaaaataacgcatgaaaacttgttcactgcttaaactaaataagttaaagaaatcacaaacatgctgccaatttttcttctttcttttaagttcaaactagcttacacacgcctcgactattccaccgggtagctatctcccaccagcacaaatatcaggtaactgtgcctatcaaggcttaaaatagcacgaaggctctccctcaaattaaaaataaattgtaggagttgaagagggaataaatactttccggaatgctcataaatagcagttgcgacagcaatctttgacataaaccaaaagaacgaaacaactaactcagaaataaaacatgaaaacttcaaattcactacccaaattacataagaaatggcaaattgcttcaaattttgaacatcgcaccgaggttcgccttcaaattaaaactaaactatgggagttaaagaaaattaccacatgctcccgcggtatttcaatgtataaggcccgctctcaagcgaccgatcaaaatgactatgaatcttatgcttccctttaccactctgatcaacaagcgtcaactcaaacaaagccctaacatccgttccttcacttgcaagcgcaataaaaaccgacacgtacgtcgaagtatcctcaggatttttcccatccggatagaagtaaatcgcccactgatgacctccgacggtgaaattatcactcgcgatgtgttttcctactcccattcctttcgccaatgaatacccctggatcacgaaccggtgcgaaccgtttacagtttccgtcacggatcgggagctcgtcggccggttcaatggactcgtatcggagacgtgagtgattattggctgctccgacattgtgtgaatttgggattttttggggtattagggtttgtgaaaggggaaattcatgggagggaattaatcggaattgtgagggtaaaatttgggaagattgtgaagaaattttgttagggttttcgaatttttgtttcgggttgtgtaaagagattgaagatagtaattgggggaaagagaagggtccgaaatattcgaattaattattgacgttggtttttttctggcgagaatgatacatttacccacaaagacaaaattatttatccttgtctatccatttgttttcctacctatcaaactaattatattttttacccatattagtttttgtggggaaattttgcttttttctctaattcttttttatttctatgttttttttcttttactttttcctttttttctttcttttctcctttttttttcctggttttcttatttatttttctttttctaatttcatttaacttatgtttttatattatttttctctttataatctaatttcatttattattttcactattttttcttatatacaataagaaaatataactaatatagtaaatatttgttcacctttttttaatataactagtataatatatattttatttatttattttctcatttttaaattcaattattaaactgaaataatatcagttgtcacttgatctaatttactaaatatcacactgactactgctgagcatcataagtaacataattaaaaatcaacacgtgattgccatgcaaaatctgatctccttccctacaaatatcagtacgcactctaccattagcagtaatacaaccagttatagagaaagaaaatataatctacaacaaccaaatctccatatatactagttagaataaaaatgataataaaatattaaaaaatacaataaaagtataagcagcaaaaaagacttctagtaccatgtgataccaatatggtatatatgtataccaacagagcatatgatttatctagaatattgctacaactatttgtgactatactattgtaccaaaacattaaaggacgcaataaaagtatgagaaaattacatgctcgtattgcaagctaaatattcgcaaaacaacttgctcattcagaatactaatagggttatatagttgtatggggttgttccaataattgcctatatctataaaaactattacataataaatataatgtatgtccatcggcacacaagaattccaacactggaaatcatgttcatataaataatttcataatagaattcacttaaaatgcagctaaaacaaccaaaataatgttctaactaccatatgataccaatatgacatataactataccaacatggtatacagttttgttggttaattcccggcaactatatggctatattactattacataacgcacatgcataaagagaaaaattaaaaatagtataccacatattaataaaataaagtatttcaagatattttactatattactattattaaaagaaaatcaaatattgtaccaattaaatgcaactaatacaaccaaaaaatgattcaactagcatatgataccaatatagtatatagctatactaatagagtatatagttgaaataaattgtatatcaaaatggtatatagtatattattttggtatacagtacaaatacttctttgcagttcaatgcaataaattacacactattaaattaaccaaaattgtatataatatattattttggtatatagagggttgatttattccttcaaaaaagagcagtaatatactattgtagttaattatatactcttgaagtagttattgtatatcaatatagtatctatttataccaatagggtgtactattgtacgcaaagagttttattttattttctaattcaattattaaactgaaataatatcagtaaattatatactgttaaattatatggtatatactaaattactatactatatatcaaaataatatattttgttcttcattcaacattatactattatattatattatatactataacattatattacacaacagcaacaacaaccatccagtataatcccacaaagtggggtttgaagagggtagcatgcacgcagccttacccctaccctggaaggcatggtagggagactgttataatattatattgttgtaattaattatataccaaaatagtatataatataccattttgttatatagtataaattcgtccttttcggtagttcaacctaaaattttaaaatctcctccaaaatctccagcaaattgattcaaaatataactacaacctccattaatattcatgcacactttaatcgcaattggattgaaataactacaaattcaacaaacccaactaatgagtttcaagcttcaagatccttcaaagatggatttaattttctcacaataaaatcttcaaaaattagcattaacatcataatctacacatcaaagaacaatatccaataaattccaacatcaaatactttaaacacacatgaaaattcaaatcttagttagattgtatatattattttttgttttacttttaggagatacaatggattatgcaacacaaataaaaaaagaacaatctacgctaaaatggtatgatatacaatggattacgggtaatatatttttatttttttgcgtttttattcgaattttgtgaatgttggatatataataggactcttttcttttgtcaattgccgttctctagttttcatagaataatgggattgataaaatagaaagaagcttaagtgttaggctggggcggataattagttgtaataaaataggtatttgatgtaattactcttaaaatggatatttacgggtaattacttttgattaggtaggtatattgggtaattttcccttttgtctttttaggaaactgtgttactcctatatttcatgatttcatccctccgtgtttaatactaaaactagcaagggattatttagtaaattacttcgagattatatttctccaattataacttatgggttaagttttatatttgggagataaacataaaataatcttatgtttggtagaaaaagatgggatatctagaattacgtgtgtaactaaatttatattatgtttggttgatgatataaatttatctttgaataaattcatattgtcaactaaacacagtacaactttaaatactcttttatgcctaattaaaaattttaagtattaagtaagaattcatttgttagagagcatcttgtccccacagtgtgagacttttatgcgtatacaactatcagacatcagatagaaaacaaaaacaaacactagtacaataacaaaaataacatatcgagtattatcgcacatcgtggggtctggggaggatagtgtgtacgcacaccttatccctaccttgtgaggatagagaggttgtttccaatcaggaaagtataagcaccacattaatgaagatatatacaagaatggacagcaccaaaaagccatacaaaagcagaataagaacaacaagatagtaaggtgatcaacaatgaaagaaaacaatggttagtcataaaaacctactaccaacggaaagcgagtctgcgtgccaatactactattatgaacactccaaactacgtactttactaccctaacccccgacctccataccttcttatcaagggtcatgtcctcggtcagctgaagttgcgtcatgtcttgcctaatcacctctccccgcctcttatttggcctacctatacctatctgtaggctctccaatgtcaacctcccacacctcctcaccgggtcatctgtgctcatccttctcacatgatcaaaccacctaagtcgcgcttcgcgcatcttgttctcaataggggccatgtccaccttgtcgtgaataacctcatttctaatccaatctaacctggtgcgcccacacatctatctcaacatcctcatctctgctaccttcatcttctgaagatgagcgatcttgactggccaacactcagccccatacaatattgtcagtctgaccaccactctgtagaacttatctttaagtttcggtggcaccttcttgttacacaaaacaccgaaagcgagtctccatttatccatcccgccctaatacgatgtgtgacatcttcatcaatctccccatccccctgaataatagacccaaggtacttaaaacttcctcgcataggatgacctacaagtccagccttacctccccttccccccttgagtctcaccactgaacttacactccaagtattctgccttggtcctgctcaacttgaaacctttaggcttcatggtttgacttcatacctctagtttcacattctcactgcctcgcgtctcgtcaataaatacactatcatctgcaaataacatgtaccacgacacctccccttggtcgtggaacgtcagtacgtccatcgctagggaaaacaaacacggactgagtgtcgacccctgatacaaccccatcataaccgaaaaatggtctgagtccccacccaccgtcctcactcgggtctttgctccattatacatgtccttaatcacgctaacgtaggaaacatgtccacatctatcctccaaacatctccacaaaacctcactcggaactttatcgtacgcattttctaagttgatgaacaccatatgcaagtctttctttgttggatcaagaatctgaatgattttgaagattgacaatggaacttaaagttgaaccaggtccatcactggagacacatacacatgcagagttaagggcacgtgaggtgcacaagcaagagataaacgaaatatgtgatctaaagagatatctcctgatcgaaaatgttgcaaattgataaggagatggactccttattcattaagaacagaatcaagataagggaggatttagggagttgagatcaactagaactcttccaccaaggaagagtagcatctgaattctagtgtatctctttgtctactaaatcctatatattgttcagtgttattattgacagcagtgcacaaacacagaagcaaaacaagaattgagagcaaaattaccaaagcaattttgcaagtagttcgtgtgagaattgagtgtgcgactctgaagctacttgaaccagctagaagaaccagttccatctgtcttcttttattctagtttaattgtagtaggtgattacaaattgtacctttcagctttatctagaagcaaattgtaataggtactgagtgttcaagttagagttaacttgaagcttgtcgcaaatagctagagactagtttgccacaaggggattagagttagtccttaggtttacaaaagagtttattttgtaaatgttgtttggctcattgatttagtgaagagtttgggaaaatcctactgggaagtaggtcgtggttttttcaccttttgagccaagtgttttccacgtaaaatcactgtgttctttaaattctgcatttattattctgcaaactgtaggagttggaacacatagaagaacatggtccttctataactgatgcacgcgaaaattggataccacacaaatcaccccccccccccccttttgtgtggtattgacgtttggaacatcaattggtatcaaagcaggttatctttgaagaggctaacaccttaggaaaagatcaaaatgagtgcaccacctgggaactgggaaggacaatcaaatgctatgccacaactcttcaatggcctgtattactcccggtggaagaacatgatgaaggatcacttaattggggaagactatgaactatgggaaatagtcactgacagccctctggccaccatgaagaagattgttgaaggattagaagtgtcaaagacaagagctgactgcactgctaaagatttgataaaatgggaaaagaatgcaaaagccaagaagtggcttgtgtgtggacttggtccagatgagtatagcaggattcaaagttgcactactgccaaggaaatttgggacacttgatcacgttcaactatgtcttctaaaaagactaagcgggcgttgcaaatataatccgggtatttttcccagagtcgaatcccacagggaactaacgtatcaaatgttattgttagattactaaattctcaataatcaaccctctcaaaagttataaatatcacttggtggtgtttttactactacagctgaacaaaaataatgaactaaagattaactaacaataaggtttaaataattgtaataaaggtctaaggttatggttcccccggttggtgaaattccttcttgtatatttcctattgttttgacttagttgtctctgtcaatcatgaacactctagttatcataaatctctctcaagtaattatgataatttactaggcacactctctcaagttacgctagctagattgcattatatttcactttagattgcacccggggtatcgttatctctaatccaacctctaaaccctcggttatggatatttcctatactccgggagtgatgttgttcaaacaactacctaaatatgcactctctctcaagtagatacataataaataggaaaagctaattgaggtccattcaatcaaatacaactacaacaagaacgtagttgaacaaatagagattaacaaccaaccaaaactatattaatatcacaacaagttcatccctaacgggttacaccaaaaccttagattaaagaagttaactactcataattgtattgcaaacaacaaaagaaatcatgatcaatgtaaaataggaagaagaaggaaaaactcgtagaagaattcccccgccttgctcctattgtgtctcttgcctccttaggtcgaatttgtgtccaaaatatgtccaatcccctaaaaataatgctctccatgtatatataccaagtagggtcgggcacaaacaattataccttctcctacgcaaaaaaggacaagtttccaggccgccactagcgcggtcgcgctaatctcgcgctagaggtcgcgctagtggggttttattctgcctcagtgcgcgtcaggtccgcagtcgcagtttcaatcgcattttttaccctgttccatttagaatttggaaaaacgtaaaacatgaaagttgtatccaatgtgagttagatttccaaccatatattatatagcctaaatggagttcggagcaaaacgttatgtccattttactagacagtgcacaatatgcctcctcgagtcttcgtttgttctcaactatcaaatttgacccccgaacacgatctcgacttaattccttgagctttactcagacttcaaagctccaaatcacttaaattcattccataacatctatatagctcggaatcgctcctacaaggcataaaactcaaactcaattaaagtgcaacaaactagagtgtaataagcgactaaaatacgtaattatagcctatcatcaacaacacacacttaaaccattactcgtcctcgagcaatcaaactacactttatatagacacgacatttttaagcaattctcctaactcatcataccaagaatatttaaaatagactaagcactaaagcgtaacatcttcacctcaagatttgactcacaagtaccacgcattattcacatctcacccgcttactctaacatagaggtcacctacattacctttccttcatgaatcaagtgccgtcacacaacaaaagagagtggttccacacaataaaatttaagaacacataggaacttaagatagaaagaattcactcactctcagaaataacattcatgagccacaaaagatgcaccataggcttgcccgtagtgtactactctactaatcgagttcattcagtctaggatcaagtaagattttatttggttgtaatgtaggctgcaggacgagtatgatatatttagatataagagtgactacacctctctaagcactttaatacatatactttaacattcaaaccccatacttatgtcaaaccaaactccgccttcacatcaatgtattttacctcatacttctttaagcacaattacatcaagagtcaccacttatcaaggctatagattttttccccacaacaatacaactatttattcttcctttttttccccaagtgactcttactttttcaaaacagtgcacctttctccttatttcattagttccactcaaaagccaaaccaaccaccccacactttaatttttacacagttcataacaatgcaagtgcttatgagaggttaaaaggttcaaatagatagtccattcaaacaattgggtaaggcttgtaatgtggttgccaaagaaataggattacaggctcaaaggggttaactacgatacataacaattaggcggtaaaatatacatatctggctcaacaaagaaacgcctatatcacttccaagactgaactaaactactatttcgctttgcaaacacacgaggcaagttctaagcatcaaatgcaatgcacaaaataacacacaaatctcacacacatatggcacataactcattcaggattggattcatcaagacactctagtcaaagcagtgaagaatatttaaaatcatacaatttaaggtacttatacaaaagtcaaaaacggagcctaagtgtcacaaccaaagtactcactattctcaaggcataacaaagtcaagactttaattcaaaacacaacacaatggctcctcttcctaaaaaaaaactaactacacctggttcaaacaaaacccttggaaaagaaccgcgatcaaaagaaaaaccaaggggggttgctacactacctaaaaagaaaataaaaaatcttttttttttctttagacttaatccctcaagaaaattgtctaatatatccatcgtcgggaaaagtccaatcttttctatttgtgtaaaaaaaaaattattccattaaactgacacaactaaaatagcatagaaagtcacacagacaatctcctcaccccacacttaaaattgtgcattgtccccaatgcacacccatacatacaagaggttaaaagaaactccctggtaggccaaaggccaaagcactagcatctcatggggtactcagacttctctcaggcctggtccttcgtgcgggtacctcacacttagttccaaccaatggtttgttgttgcatccttccagtagctttgctttccatgatcctaaaaaaaatcaaaaagcgacactacaaaaataatataatacaaaaataataaaaaataaaaataaaagaaagcagtaaagatgagttgcctcccaacaagcgcttgatttaacgtcgcggcacaacgtgaatcactttatgcctccactttgaacttatgaattggactccaagttttgattcttctctatgatcatgttcatggggtggtggaacaaatctgactggcccaataaaacaatgtagtattctgcacttcttggcctttagatgagatgtgtattcccgactttctggcaagaagaattccagagtgtaggcttcttgttccttattccttgactcctcaagtggctcggatgactctacttttatatcatcatccaaacacaatgtggaaaaatgctttgagtatgtaccaatgcgctcaactacataaattttaggattgtcaacatcctcaacactaataacactagacaactaaatacgtatcatcaatgtccttggttaactctagtatctcttctacaacattgacatcctcaaagttcagtttgattgattgttggtgttctactctggccttctccactagcacctcctcacatttttttaactcctcaatcttggctggaggagtttttcttccctctaagtcaaaggctcaaattcgagctcccttttccaaaagccttggacttcaagagtaagtacccactctgccaagtcttctccattagcttcatctaggctcatgagacaagctgatagaggatcctcaatgtttgaccccgaaaatagtcccttgttctgcaacaagtgcagcatgttgttcgtgatctgaaaagattcatcctttatttgtgggactactattgtcgtggcctaattctccactatgggttgtgcccaatcatataaaagaagaaccaagttagcaaacgttaaaatttcaatgtatagattgaaagtgaagaaaattgactacacttaagaattttgtatttcttccgactctaatttataacaccgttaattccccggcaacgacgccaaaatttgatcacgctcaactatgtcttctaaaaagactaagcgggcgttgcaaatataatccgggtatttttcccatagtcgaatcccacagagaactaacgtatcaagtgttattgttagattactaaattctcaataatcaaccctctcaaaagttatgaatatcacttggtggtgtttttactactacagctgaacaaaaataatgaactaaagattaactaacaataaagtttaaacaattgtaataaaggtctaaggttatggtttccctcgttggtgaaattccttcttgtatattttctatagttttgacttagttgtctctatcaatcatgaacacttcaattatcataaatctctctcaagtaattatgataatttactagacgcactctctcaagttacgctagctagattgcattacagttcactttagattgcacccggggtatcgttatctctaatccaacctctaaaccctcggttatggatatctcctacactccgggagtgatgttgttccaacaactacctaaatatgctctctctctctctcgagtagatacataataaataggaacaactaattgaggaccattcaatcaactacaacaagaacgtaattgaacaaatagagattaacaaccaaccaaaacttctccattagcttcatctaggttcatgagacaagctgatagaggatcctcaatgtttgaacccgaaaatagtcccttgttctgcaacatgttgttcgtgatctgaaaagattcagcctgtatttgtgggactactattgtcgtggacaaattcttcgccgtgggttgtgcccagtcatataatagaagaaccaagttagcaaactttaaaatttcaatgtatagattgaaagtgaagaaaattgactacacttaagaattttgtatttcttccgactctaattgataacaccgttaattccccggcaacggcaccaaaatttgatcacgctcaactatgtcttctaaaaagactaagcggacgttgcaaatataatccgggtattttgcccagagtcgaataccacagggaactaacgtatcaaatgttattgttagattactaaattctcaataatcaaccctctcaaaagttatgaatatcacttggtggtatttttactactacagctgaacaaaaataatgaactaaagattaactaacaataaggtttaaacaattgtaataaaggtctaaggttatggtttcccccgttggtgaaattccttcttgtatatttcctatagttttgacttagttgtttctatcaatcatgaacacttcagttatcataaatatgtctcaagtaattatgataatttactagacgcactctctcaagttgcgctagctagattgcattacagttcactttagattgcacccggggtatcgttatctctaatccaacctctaaaccctcggttatggatatctcctatacttcgggagtgattttgttccaacaactacctaaatatgcactctctctcaaatatatacataataaataggaacagctaattgaggtccattcaataacctacaacaagaacgtagttgaacaaatagagattaacaaccaaccaaaactatattaatatcacaacaagttcatccctaacgggtttcaccaaaagcttagattaaagaagttaactactcataattgtattgaaaacaacaaaagaaatcatgatcaatataaaataggaagaagaaggaaaaactcgtagaagaactccctcgccttgctcctattgtgtctcttgcctccttaggtcgaatttgtgtccaaaatatgttcaatcccctaaaaataacgttctcccatgtatatatgccaagtagggtcgggcctaaataattataccttctcctacgcgaaaaaaggacaagtttacaggcctccactagcgcggccgcgctaatctcgcgctagaggtcgcgctagtggggttttattctgccccagtctgcgtcaggtccacaatcgcagtttctatctaatttttgaccatgttccatttagaatttggaaaaacgtaaaacaaaaaagttgtatccctttgagttagctttccaaccatatattatatagcccaaatgagttcggagaaaaaagttatgtccattttactagacagtgcacaatatgcctcctcgagtcttcgtttgttctcaactatcaaatttgacccccgaacacaatcctggcttaattccttgagattttacttagacttcaaagctccatatcacttaaattcattccagaacatctatatagctcgtaatcactcctacaaggcataaaacacacagttagtgcaaaacactagcgattaaagcaaaaactcaattaaagtacaataaactataatgtaataagcgactaaaatacgtaattatagcctatcatcaacactctgtaagtggctcatgaaggtactgcacaagtaaaaatatctagaggtacattactatactctttatataagaatttgtctatgaaggaaggagaaaccatccaagagatgtacattaggttcactactctgacaaatgaactaaagtctcttggaaggattattcttgaagaagacaaggttgaaaagatttttacaagggttttgccaatctcttgggaaagtaagatcactgcaattcaggaatccaagaacatggcaacactcaggttggatgagctaattggaaatctcactgcctatgaacttagaaggcagacaatgaagatggatgctcccaagaaagaaagaatcctgacactgagaatcattgagggagcaggactggaggaagatgagatggctatgatcaccaaggaatttagaaactatctcattaagaaaaatggcatctcaagaggtggaacctacaacaaggcaaaggctccggaaaaacccaccaacaaatgtggaaaaattgttcatcacatcaacaactgtcctcagtggtaagtggaatggaaaagagaaagatctgaaagaaggaactggttcatcccaagaaaacatcaacaaaagttatggttgctgcttggggagaaaactcagatgaagaatcagatgatgaagatggagatgaacaagcgcgctcatgtctattggtgaatcagatgaggaatcagaggtaagtatatctcatctcaaaaataagattaagttcatatataaagaaaaactctctgaactattacttgatttcattgatgattctgaagaaataaataaagagaaggaacagttgtctaaggagtgtgtaatgttaaaagcaaagtgtaagaacctggagctcagagtaagtgaatatgtgagtgaaaactgctctgaagaaccaggttcatccacttgaaacaaatgtccaagagttaaaatatggaaatttaaaactgaaactagaaaccagtaaaaagacagctgacaactctcaactcatcttagaagaaaatgtaggcagactaaaggatgagatgtataagaaagatgaacatataagggtgttgaaggaggaacttgggaaggttaagcatgaactggacagaacttgcaaatggaataaatcctctgatgccttaacatggctacaagaaaatcatagtagcaacagaagaggacttggctttgggagtcaactacctaaatgggatcccaaaagcaagtacctcacacttcctgagaataaaatttgtacccactgtggtaagactggtcactacaaaattgaatgcaatgcaaaagagcaggccagtcaaaataaaaagtttgttcgaaagaaaaggtggctaccaaattgggctaaaaggaacctaattcatcctttttcttatcaaaagggacccaaactagttagggttcctaagactaaccctgatttgcttttgtaggttcaagtgaaagggagtagtcaaatatggtacatggatagtggctgctcaaaacacatgactgggaacaaggaacaattcctttcacttgagaacctcaaaggaggaaatgtctcctttgaaaatggaaagaaaggtgaaatcattggggttggtaaggtaggtaaggatgacacacgttccattgagaacgtctacttgatagacggcttgaaatatagcctgatcaatatgtcacaattgtgtgacagaggtaacctagttgcattcacttctacaaaatgctttgtaattaatcttatcattgacaagattgttctgtagggaaaaagagtgaataatatctatatcatagacctgtccacactatcagaaaacgaattaacaggcttgagtgtgctggatagtgatcccctcttttggcacaaaagacttggacatgccagtctaaatcaactcaacaaattagtctccaaggacttggtgacaggcctccctaacattaagttcaaggaagacaaagtttgtgaggcttgtgcaagggggaagcatgtaagatcttctttcaaaagcaagaaaatgataagcaccactaggacgttggaactggtccatatggatctatggggacccatgagaacactgtgcagaggtggtaagaaatatgtaatggtgcttgttgatgactattctagatttacctggacattattcctaacatctaaggatgaagcatttgacatgtttatctcttttgttagaaaaattcagaaacatttaagaaatcaacttgcatcaataaggtctgatcatggcactgaatttgaaaatgcaaaatttgctaaattttgtgatgaacatggcatatatcataacttttctgcccccataactccgcatagcttatgggcagaagcaataaacactgcatactacatcataaataggtgcatgactagaccacttgtagagaagactccctatgagttactcaaagggagaaagcccaatatatcccatcttagggattttggctgtaagagctttttgcacaacaatgacaaggactccctaggtaagtttgatcccagaagtgatgagggagtattcttgggatattcatcacataataaggcttataaagtgtataacaaaagaactatgtgtgttgagtaaagcgtgcatgttgtttttgatgaaactaacattctttatgagagacatgaacaagaagatgaagaaattgggcttgtcagaaactcagaccaaattggagcaacactggaagatggaacaggtgatagaacaggtccatctaccctgagcatcttgacggggggaactcaacaacaaaactcaatggaatctgtccctgatcatgttccacataaatgaggcactattggatcatcaagttatgaccagctggttgtaagaccacacagatatcaaatttctcaccccattgagaacatcataacttatctaacatctggaatcaaaaccagatcctctctgaaaaatttgtgtgttttttatgcttttctatctttgaccgaacccaaaaatgttgctaaaaccttgcatgatgcaaaatgggtaaatgctatgcaagaagaactcaatcaatttgaaagaagtcaagtgtggtatctggtacctagaccattagatagatcagtgatcggcacaaaatgggtctttagaaacaaactggatgaagatggaacagttacaagaaacaaggcaacactagtggtacaaggatacagtcaggaggaaggcatagactatgatgaaacctttgctcatgtggcaaggttggaggcaattaggctcctcattgcatttgctgcctacatggaattcacccttcaccagatggatgttaagagtgacttcctgaatggctacctaaaagaaaaagtatttgtcaagaaacctccggggtttgaaagcaatgagaatccagatcacgtgtacaaacttgacaaggcactgtatggactcaagcaagcaccaagagcatggtatgaaagactatctaaattcctgcttgagcatgactacaatagaggtaaaattgattgcaccttattcttgaagtaaaaaggtaaggatctcttggtagtacagatatatgcagatgacataatatttggggaaacttctgaaaaactaagtaaagaattttctaaactaatggggagtgaatttgaaatgagcatgctgggtgagcttaatttcattttaggcttacaaattaaacaaaattcaaatggaacaatgatccatcaacaaaaatatgtgaaagagttgctcaaaagatttaaaatgaaagactcaaaagaaattgatactctcattgcaacaaccacaaaactagatgtagataaacccggttcatctgctgatcaaaaattgtatagaaggatgattgggtcattgttgtatcttattgccagtagacctgacaatattttcagcatagggctttgtgcaagatttcaggctaatccaaaggaatcccatttaactgcagtaaagagaatcttgagatatctaaaaggcaccactgacctatgtctttggtaccctaaaggtagtaattttgatcttgtggaatatgctgatgttgactatgcaagattcttggtagatagaaagagcacttcaggtatggcacacttcttgggctcatgtctttgtattggtaaaaaagagcttcacacgtgtaacaaatgtggtgactcggtaatctatgtggagtaatgaaaacacgataactggacaggactctatgaagaggtacgaggcacggaatagcacacccacggggtaattagctacgggaatctcaacctaattgagaagatgaagagacgggttcagagtgaatccgggcataataaagggcaaattcgaagatcttcaattaatgagctagatgttacacgaccttcacgcaacagttacggttaatcattgtaacgttacattaatgccattattagtcattaatgctcaatcactgaaaagggtagacgttatattaaaaaattccctatataagggagtaaaatataacttgtaagggacattcgaactactactgcaatacacttacttttagtgcatcttattgctttccatttacaagtttacttacaattactagtttattctttggttatcataaacccgtgttcttcttaaaatagctttgagcaaagaatccaattctttggttaaacaaattggttccgttaccgggaatctgataatctttacttactttcaaactataccctctgaactatgtcgaacaccaacgacaacaaccaacaaagggatgaaactccatcaccttcaagaaccccatcaggttcaagggaacattcttcagagagatccaataacaatcacaatggtaacgatcaaacatgagaacaagatcaggtgaagcaaatgattgcggaatatgtaaaccaagccttacaagaatttgtgagggggttaccagccgcatcacctacaccacctcctaacaacaccataactgtggaaaatcctcaatctgggttagcaaactcaagaagtaggggaaatcccaacgaatccctagaaacaagaacaggtatgtccaataacccagagttacaatctttattactaaccttgcagaaacaggtgaaggaacaaaacaatcgaatcgaacaaattcctggagtaccacctgttatcaaaggcattgacattgatagatattctcaacaaccctggaagccaagtgcagcgcccctgcctattcccaagaaattcaaaatacctgatgttcctaaatatgacgggacaaatgacccacgcgaccatgtgaatgattttaccaccggagtgaagggcaataacttgacaaagtaagaaattgagtcagtcttggttaagaagtttggagaaacacttaccaaaggagcgttaacctggtattctcttctccctgaaaattctattgattcttttgctaagcttgcaaattcttttataaaagcgcattacggtgcgcaaaaagtcgaaaaaagaatggaggacatatttaaaataaaacaagtagttccaagtcattgatactgacatggcctacaacgtaatcatggggaggccatggatacatgacatgaaggcagtaccatctaccttgcatcaggtaattaaattcccttctgaatggggaacagattcgaggcgatcaacaaacctcaaggaatataaattccgtgggacactatgccaataaaaaagaagcggaaaaatcaaaaggtacggagaaaactgttgctcaaataggtacggaagaaattgttgcccaaacaggtatggaaggaattattattcaaacaggaacaaatagtcacgagaaggcgaatcaagtcaccatgggaggtgtatcaaaccatgcagacatggattccaggcctgatgtcattcaagagccagaagaagatgaacacatcaaaactaccacggaagagcttgaagatgttccattgtatgaacaaaagcctgaacagaaagttcacatatgcacgaggctaagccccatccgaaaaggtaagttaattgattatttaaaagctaatgcagattgctttgcatggtcccattcggacatgacatgtatcccgcaggaagtgatgactcataagctaaatgaagatccatccttcgtacctttcaagcaaaagaaaagaaacagggaccattcaagaaccaattgattgacgaagaggtacaaaaatgtttgcaaattggttcaatacgtgagggggacttattgctacaaactcgtgccttttggcctaaaaatgctggagccacgtaccaaagtcttgtgaccaaggtgttccaggaacatctggtaaaaacgatggaagtttacatcaatgacatgctggtgaaatcaacacaagcggaagaacgtttccagcatctttcaaataccttcgaaattttacgcaggtataatatgaaactaaatctagaaaaatgcgcctttggcgtagaatcaggtaagtttttgggtttccttgtgtcaaatagaagaatagaagtaaatcctgctcaaactaaagctatcgaggaaatacctaatatacttacaaataaaaaagaagttcaaagactaacaggcagaattgcagccctgggaagatttatttccaggtcctcggagaaattttttaagttcttttaagttcttaaaaaacagaatcagttcgaatggactgaggaatgtcaacaggctctcaacgatatgaaggcctatgtgatgacccaaaatgggtcatcttatgtaaatctaattttgactgtgttgtgagacctcgaaagcctccgttaatctcacctcgatgtgcatgcacagcccagacgcgtagccgggaagcctttatgtgaaaacttgattaagaattgaatttatgataattaattgaataaagttgactttggtcaacatttttgataaacagacccgaatctatgatctgacggtcccgggaggtccgtaggaaaatatgggacttgggcgtatgcccaaaatcgaattttgaggaccgaagtccgagaaatgaatttttaaagaaaattattttatgaaaatattaaaggcttatgaaaatgaacctttatatgaaacctgagctaccgggcccgtattatggttttggagcccggaacaggttgaatatgtgttatttgaattatccgtgaaatttggtaagaaaaggacttgatttggcgggtttcggatcaaaatgagaaatttagagttaatgaagttttgagaaatctcatagaatttgaaatttggtttggaatgtgattttatgttcccgaggtccgaatgaaatttcgagaccaggaatagttctgttatgtcatttatgacttgtctgcaaaatttgaaatgattccgagtagtatagatcggtacggtgcattgacgtgagttctagaatttcaagttcttaagttttgattcaatttggttttggggttgaattctgagtttcgttgttgtttgtcatgttccgagagttcaagcgagtccgtatcacgaatacagacttgacagtgcttttggacagggtcccgaggggctcggggtgtgttttagacccccgggagctaagttagaaaaaccagaaatttctgctatctggtttccttctttgtgatcgcagaaggtgggttgcgatcgaggagaaggattttgctgggcttttgattgttctttgcgatcgcagcctcccttttgcgatcgcagaggtctgggttccacgccttcgtgatcgcagcctgttattgcgatcgcattgagtcgcatctaggccgggtgagtttgttcttcgcgatcgcatgacctctgccgcgatcgcagaagtctggccagttggcctttgcgatcgcaggacctctgccgcgatcgctgaggtctggccagttgttctttgcgatcgcatgacccttgtcgcgatcgcagttaaggaatccctgggcagtgttattaaatatgggacttaacatatttcctccattttcatcttcctcctcaagtttttagagagctcttcaaggaaccttaccccattgttattgaggtaagtaaattccatggttttactagtttcaaacattaattcctagttagattccctactaaattatctaaaatcatagaatgaggtagtaattttagggttcttgagaattttatgatttttccattttaggccatgaattcaagtagaaatcacacattaatgatccataggctatgggtgagtgatcccttcgagaattttcggaatttgatcatgcaggaccgggattggaatttgggaattattcaagaatagcgattttagtaaataactaagataatttcccacattatgcatgcattgatattattttacacctttctggctagtagcgagtccccgggtgtagagttcggagtttcgggcgcaattgtggtccgaggggtagattcgacacaaggtgagtctcctttctaaccttgtaagagggaattgtccccataggtgatgtatatgctatgtgtaaattgtttgggggctacgtacgccccaagtgacgagagtccgtacgtagcagctattattgttatgtccgggtagttaggcccacatcatgccttgtatgctttctcgtaatgccttatatgcttttctcgtaatgcctgatatgttttccttgtaatgctttatatgatttattgtgacgccatatgtactatgagattatgttttgtatagtgttgttcctcttaggctttatggtaaattgttgagtggcaaggaatttgttatggaaagtaagtattgtgaaatatatgggatcgggtcgtacgccacgacaggtttgaaagtgattatgtttatatgggatcgggtcgtacgccacggcacagttgaaaagaaactgtgaaatatatgggatcgggtcgtacgccacgacagagttgaaaagaaattgtgaaatatatgggatcgggccgtacgccacgacagtattgagaaattgtgaaatatatgggatcgggccgtatgccacgacagtattgagaaattgtgaaatatatgggatcgggctgtacgccacgacagtgttgaggaataattgtgatatatacatgggatcggttcgtacgccacagcgagtttagaaggtaccttatgggagcgggccgtacgccacagtggatctaagaatctgtgattattgtttcgttcggtggtcttacccttgaaagtgctttattgtttagttcagtagttgtttgaatttctgcttctgatatgtacttgttgcttatctcctgacatgcctactgtatttcattatattctatcatatgttattactgttggaccttagtgagtatcgagtcgacttctcgtcactacttcttcgagtttaggcgggatactcactgggtacatatttatttaatatgtactcatgctacactttcttttcttttctgtacttgactgtactggtccggaggctggtacgtctgattatcaggtcggtgctagatattgatagcgtggtcatacttcacggtgagctgctatcccggcgacttcctagcagcaccctggagttcttttgttatattctctatccaatccattcagaatgagactctgtatatattatagtccttgtatatttagtagttgcccatgacactcgtgacactagttcctggcacacacgcgtggtgtatatatattttgggtttgggtggtgcaggcatgcatatgctttatttccatgtcaagctatcatcatgtttaactgtttaaaatttgcaaatgttgacttgtttaatcaggcgggaagggtaacacttagtgtaatttgtgttggcttgcctaactccgtcgttgggtgccatcacgacccggattaggattttaggtcgtgacaacatggtatcagagcactaggttcacgtaagtctcacgagtcacgggcaggcccagtagagtcttgcggatcggtgcagagacgtctgtacttatcttcaggaggctatggggtgttaggaaactttccttattcatatcatgtcgtgcaatctatgatgtactcaaacttattcttctattctctcacagatggtgaggacgcgtgcatccgatgcttctggcccaggagatgccgtttcccccgccgcccgaggtcggggtagaggcaggggtagagcacctgctcgaggcaggggacgagggcgccccagagctacaccagtggcaccaccaaaggaccctattatggaggaaaaggatgaggtgcctccagcagcacctgctccagtggatttcatgacggggccaggcttccaagaggtcatgggctgtatgctgagattcatggacactatgtctcgggctggtttatttccagccgaccctgctacttctcaggcgggagggagagtccagactcctaccgctcaggccacaggtcaggcagcaacaacacgtcataccccgggcacaccgtccgtgggaggggttcagcccgtagtagcagccccagagcccaggctagttgcagagggtgaccagcagaagatgttggatagatggacccgacttcgccctctggtcttcgggggtgagcggggagaggatgctcaggattttattgataggtgcagggacaaactgcacaacatgaggattttggagtcccatggagtggatttcaccacattccagttagagggcagagctcgcaggtggtggcagtcatatattctcggcaggccagcagattatactcctatcacttgggatcagttcgctcagctatttctagacagatacattccaccttctgagagggaggagctatggggtcagcttgagcgactagagcatgggaagatgtcagtgaccgattatgaggctagattttccgagttatctcgccatgcccttatgatattgcccactgatgccgagagggtgcggcgatttgtggcaggcttgcatccaggtattagggcctctatggtcagagaggtagagatgggtaccccataccaacttgtagtcgagatagctcgacggattgagggttaccgtatgaggagcagggtcagccaggtcagcagggtcagcaggacaaaagggacaggttcacaagtgacttcaggggtgctccagctaggggcagaggtaagttcggggcggccagctcggtaggtcttcatattcagcacctccactacctcccaggggtatttcagcgaggcctcagtttactgcatgcagagcactcttaccatccaccagccacccagggtgcacccaacagttattccagtcatcagagatcctctagctcctatttcagtgccttactagagggttcacaccgccctccggctattcagggttcttcctcattcgggcagcgggttgtagaaccagaaggttatttcgagtgtggggagccgggtcatacgtggaggtattgtcccaggtatcggggcaaggtagtgcagcatagttatcagcctaggagttcagcaccagcggtccggcaacctcgaggtggagggcaggtcggcatgggtcgtcctagagggggaggccagccaggaggaggtcagttagttcttgttcactctgggggagttcagtcttcaggaacctcagccagattttatgccattccggccagatcagatgcagtggccttagacgctgtaatcataggtattatctcagtatgtggtagggaggcttcggtactatttgatccaggatccatgtattcatatgtttccatactattttcacattttctggatatccctcgtgagtccttgggttctcctataaatgtgtccactcctgtgggcgattctgtggtggtagaccgagtctaccggtcttgtgtggtcactttctctggtttcgataccagagcagatcttttattgctggatatgattgattttgaggttatcctaggcatggattgtctatctccttatcatgttgtgttagatttccatgccaagacaatcactttagccatgcttgagtcgcctagactagaatggagaggttcttcagttagtgcctccatccgggttatttccttcataaaggctcggcatatggtcgagaagggttgtttggcctaccttgcttatgtgcgggacaccactgccgagtctcctaccattgattcagtgcctgttgttcgagagtttccggatgtgtttccttcagatcttccaggcatgcctccagatcgagatattgacttctgtattgatttggctccagatactcaacctatttccattcccccgtatcgtatgtctcctaaggagctgaaagagttaaaggagcaacttgaggagttgttggctaaggggttcatcaggccgagtgtgtcgccgtggggtgctccagtcctatttgtgaaaaagaaggatggatctatgcgaatgtgtattgattaccgccagctgaataaggttactattaagaataagtatcctctgccgcgcatcgatgatttatttgaccagttacagggtgctcgtgtgttttccaaggttgatttgacatcgggatatcatcagttgaagattcgggctttagatgttccgaagactgcatttcgtaccagatatggacattatgagttcctggtgatgtcctttggtttaactaatgccctagcaacattcatggacttgatgaatagggtattcaggccatatattgattccttcgtcatcgtcttcattgatgacatcttgatttattcgcggagcctgggtgagcatgagcaacatttgagagttgtgcttcagaccttgcgagcgcagaaactatatgctaagttctccaagtgcgagttctggttagattccgtggcatttttggggcatgtggtgtccagagaaggtatcaaggttgatcctcagaagattgaggcggttcagagttggccgcgtcctacttcagcttcagagatcagaagttttctgggtttagcaggatattaccgtcgattcatggagggattctcctctattgcggccccactaaccagattgactcagaagagtgccctgtttcggtggtccgacgagtgtgaggcgagctttcagaagctcaagtcagttttgacctcagcaccaattctgtcattgccttccggttttaggatgtataatttgtattgcgacgcttcacgcgtcgggttgggatgtgtgttgatgcagcatgtcagggttattgcttatgcttcgcgacaactgaaggatcatgaaaagaattatcttgtacacgacttagagttggcggcgattgttcatgccttgaagatttggtggcactatttgtatggtgtgtcatgtgaggtctacactaatcaccacagtttgcagcacttgttcaagcagagggaccttaatttgaggcaacggagatggcttgagttattaaaagattatgatctcactattttgtatcatctgggcaaggcaaatgtagtagcagatgctttgagcaggagggcagcgagtatgggtagcttggcctacattgcagctgaggagagacctttagccttggacattcagcccttggccgatcgccttgtgatattggacctttcggagcctcgtcgagttttggctcatgtagttgctcagtcttcattgttgggggagattaaggctcgacagtttgatgatccatgccttgtagagcttcgagatacggtggtccagggcaggaccaaggaggttactttgggcgaggatggtgtcttgaggctccagggccgtttatgtgttcctaatattgatggcttgaggaagagaattttagaagaggaccacagttcttagtattttgttcatccgggtgcgacgaagatgtaccgtgatttgaagcagcactactggtcgaggcggatgaagaaggacattgttcagtatgtggccaggtgtcttaattgtcaacatgttaagtacgagcaccagaggccagggggcttgtttcagcggatgcccatttctcagtggaaatgggagcgcatcaccatggactttgtggttgggttgcctcggactttgcggaaggttgacgcggtttgggtcattgtggatagattgaccaaatcggcgcatttcattcctgtggctactacttatactacagagaggctggcccagatttatgttcgggagatagtccggttgcacggtgtgccagtgtccattatatcggatcgaggtcctaagttcacctcgcacttctggagagcatttcatagtgagatagacactcagatagatctcagcttagcatttcaccctcagactgatggtcagtcggagcgtacagtccagattttggaggacatgctcagggcttgtgtgattgattttggcggtcaatgggaccagttcttgcctttggcggagttcgcatacaataacagttatcagtccagcatcgagatgactccattcgaggctttatatggtcggcgatgtcgttctcctatcgggtggtttgatcccggcgaggccaagttatatggcacggatttggtgagagatgctttggatagggtgaagattattcaggagagactccgcacatatcagtccagacagaagagctacgcagatcagcaggcgcgtgatgtagcatttatgggagagataaggttatgttgaaggttttgccgatgaaggcgttatgaggttcggtaagaagggcaagctgagccccaggtttataggccctttcgaggtgttgagacgagtcggggaggttgcatatgagctttctttacctctcgcattgtcaggagttcatccggtatttcatgtatccatgctccggagatatcatgccgatttctctcatgtgattgattttagcactattcagttagatgagaagttgggcttcgaggaggagccgattgttattattgataggcatgaccgccagttgaggtctaagagaatttctgccgtaaaggtccaatggaggggccaaccagtcgatgaggcgacctgggagtccgaggaggatatgcggagcaggtatccatagctattcggtacttcaggtacgattctacgtccgttcgaggacgaacgtttgttttagagggggagattgtgatgacccaaaaggggtcatcttatgtaaatataattttgactgtgttgcgaggctccgaaagcctccgttaatctcacctcgatgtgcgtgcgcatcccgggctcgtagccgggaagcctttatgtgaaaacttgattaagaattgaatttatgataattaattgaataaagttgactttggtcaacattttttgtaaatagacccggatccgtgatctgacggtctcgggaggtccgtaggaaaatatgggacttgggcgtatgcccagaatcaaattccgaggatccaagtctgagaaatgaatttttaaagaaaattgtttaatgaaaatattaaaggcttataaaaatgaaccttgatgtgaaacctgagctgtcgggcccgtattatggtttcggagcccgcaacaggttcaatatgtgttatttgaattatccgtgaaatttggtaagaaaaggacttgatttggcgggtttcggatcaaaatgggaaatttagagttaatgaagttttgagaaatctcatagaatttgaaatttggtttggaatgtgattttatgttcccgaggtccgaatgaaattccgagaccgggaatattttcgttatgtcatttatgacttgtctgcaaaatttgaaatcattccgagtagtatagaccggtacggtgcattgaagtgagttctagaatttcaagttcttaagttttgattcaatttggttttggggttgaattctgagtttcgttgttgtttgtcatattccgagagttcaagcgagtccgtatcacgaatacagacttgccggtgcttttggacggggtcccgaggggctcggggtgtgttttagacccccgggagctaagttagaaaaaccaaaaatttctgctatctggtttccttctctgcgatcgcagaaggtgggttgcgatcgcggagaaggattttgctgggttgttgattgttctctgcaatctcagcctcccctttgcgatcgcagaggtctgggttccacgccttcgctatcgcagcctgttattgcgatcacattgagtcacatctaggccgggtgagtttgttcttcgcgatcgcaggacctctgccgcgatcgtagaggtctgtccagttgttcttcgcgatcacatgccccttgtcgcgatcgcatttaaggaatccctgggcagttttattaaatacgggacttagcatatttcctccattttcatcttcctcctcaagtttttagagagctcttcaaggaaccttcccccactgttattgaggtaagtaaattccatggttttactagtttcaaacattaattcctagttaaattccctactaaattatgtaaaatcatagaacgaggtagtaattttagggttcttgaggattttgtgatttttccattttaggccatgaattcaagtagaaatcacacattaatgatccttagggtatgggtgagtgatcccttcgggatcagggttggaatttgatcatgcggaaccggggttggaatttggggattcttcaagaatagcgattttagtaaataactaagataatttcccacattatgcatgcattgatattattttacacctttctggctagtagcgagtcctcgggtgtagagttcggagtttcgggcgcaattgtggtccgtggggtagatttgacacgaggtaagtctcctttctaaccttgcacgagggaattgtccccataggtgatgtatatgctatgtgtaaattgtttggggtctacgtacgcgccaagtgacgagaggtcgtacgtagaggctattattgttatgtccgggtagttaggcccacatcatgccttgtatgctttctcgtaatgccttatatgcttttctcgtaatgcctgatatgttttccttgtaatgctttatatgatttattgtgacgccatatgtactatgagattatgttttgtatagtgttgttcctctaaggctttatgggaaattgttgaatggcaatgaatttgttatggaaagtaagtattgtgaaatatatgggatcgggccgtacgccacagtaggtttgagagtgattatgtctatatgggatcgggtcgtacgccacgatagagttgaaaagaaactgtgaaatatatgggatcgggccgtacgccacgacagagttaaaaagaaattgtgaaatatatgggatcgggccgtacgccacggtagtattgagaaattgtgaaatatatgggatcaggccttacgccacgacagtgttgaggaataattgtgatatatacatgggatcaggccgtacgccacggcgagtttagaaggtaccttatgggagcgggccgtacgccacgacggatcgtagaatttgtgattattgtttcgttcagtggtcttacccttgaaagtgctttattgtttagttcagtagttgtttggatttctgctcctgatatgtacttgttgcttatctcctgacatgcctactgtatttcattatattctatcatatgttattactggttgaccttagtgagtatcgagtcgacttatcgtcactacttcttcgagtttaggcgggatactcactaggtacatatttatttaatatgtactcatgctacactttcttttcttttttgtacttgattgtacaggtccggaggctggtacgtctgattatcatgatggtgctagatattagcgtggtcatactttacggtgagctgctatcccagcgacttcctagcagcaccctggagttcttttgttatattctctgtccatttcattcagactgagactctgtatatattgtagtcattatatattcagtagtttcccatgacactcgtgacactagttcctggcaggtttatatatattttgggtttgggtggtgcaggcatgcatatgctttatttccatgtcaagctatcatcatgtttaactgtttaaaatttgcaaatgttgacttgtttaatcaggcgggaagggtaacacttagtgtaatttgtgttggcttgcctaactccgtcgttgggcgccatcacgacccggattaggattttgggtcgtgacagcctacctatcaaaacccccgctgctatcaatgctaaaagagggggaaaggctgtatgtttattttgccgttgtagaaattgtcgtaagtgcagtactggtaagggaagacaaaggtaaacaatcaccaatttactatgtaagtaagtctttgttgaatgttgaaactagatacccacatctagaaaaacttgctttagctctagttatggcagccagaaagttaagaccatattttcaatgtcatccaatcacagttttaacctcatacccattgagaaatatattgcataagaaagaattaccgggaagactatctaaatgggctatagaattaagcgagcattacataatatatcagcctaggactgcaataaagtctcaaattctagctgatttcgtcattgattttaataatagcattgtccttgaagtggaaaaagaattacaactctttaacgaggctaatccgggtatttggaccctatttactgacggctcatctaatgtaaaatgagccggcttaggcataatcttaatatcacccacgggtgaaaagacacgacaagctattaaatgttatcatataattaacaatgaagcagagtatgaagttgtcattgcaggacttgaactagcacgagaactctcaatcgagcagatcgtgatcaaaagcgactctcaactagtagtgaaccagatacatgggacttatattgctagggagactcaaatgcaacaataccaggaaaaggcacgagatctcgtatggcaattcaaatcatggaaggttatgaaaatacatagagaggaaaatgtagaagcggatgcattatctaacctcacagcagttatagaagtgacaaataaagacaatgcaattgtcgttcacttatttcattcagcaattgaccatgacaaaaatgaggtaacacttaacaatttaacctgggactggagaaacgaaatcttaatttttttgcagaatggtaccgtacctgaagataaaaaagcagctcaagcacttcgcaaaaaagttgcatggtactgcctcattcacaattctttatgacgtaagatgttcggaggtcccttagcaaaatgacttggacccaatcaaacgaaattcgtgatgagggaaatccacgaagggcactgtggaaatcatgcaggagcaagatccttagtcaaaaccctagtcagagtagggtactattggccaaaaatggaagaagatgtcgagggcttcgtagctaaatgcgacaaatgccaacgatttgctaacaacatgtatcgactgtcgcgccccctttttcctcacggagatcgggtttatgacatttttggttaacaaaactctttccttttgggaaaggggtttgtgtttttgaaagtcgccacctaacgatttttaaaggtgtgttaggacaccaaaggggttcatttacaactatgttgttaactagtaagggcttgaaattatcctaaggggaaggtgttaggcacccctcaggatccacaagtgtggttcccggccaaacaacttttgtgaatttgtacgactttggcaaacaaacaagtaagggctcaaataagaggggatttaagcctaagtacacatagaggtttgaaaacaattaatgaaaagaagtttcgaaaagcgttacaatctaagcatgtgagagtaaaggatatcctaggtttgtggtaatatggatcacatcaatgcaatacccggtatgacactcctcaaagaggggctacacgtggtattagcgcatcggtcatcatatccatattctatcctttcccaccccgtgaaggtaattaaagcgcgtattggtcacgaactctatagcatgctggtacccgtcccttcctatcaatcccagaggaagttaggactactatcctaaaagggaggtttctaagtacaccctcacttttcaaaagtaaaactgctaaggcgacaaataacaaaacaagtaggactgcacataagggaagaacatggaaagcaattaaggggctcaagtatacctccacatatagtgcacatacacaacatgcctcatacacaaatttaggtccagattcagctcctaaacatgatgtctaagtgacaatagcagagttcaattatatcacataactcagagaggaagtcctagtcatggcttgcctactgattttagcaggctggtagttaaacatgatcacaaagacagattttaatagttgtttgcctagaacatgatctctacgtatatagcatggtaaagaatgattgcagatttgttaacacactcgttttaaggcaggatttaaattacgttttcggaatcacatgatagcagtttttcattgtaattactgatcctatgaacatgattttctaagtgaggatgatgtgctgaaataaaagcggatgtatcaacataagttacaaaatgcatggcatgcttgtgtcacgacccaattccgctcaggtcgtgatggcgcccaacggtagggtcgggcaagacatcatctatctacccgtgtgatttcttgcgtgattaaatgattctttaaataagaaaacctttaaaaccaatctctaagtgaaagaacaaggcaatttacaacccaaaataaagtagaatctgtttatatttaccaaaatatcaagaaatccatatatatgccagaatctagtgtcacgagtcaacatgcgactgattatacaaaaccctgctaataaatacaatgatgtatgatataaaaagacaactccacagtgctgccaagatcgtcaaggaaagcagctcaccgtgaaatcagcagaaggaaactctcaacgatggccgccggaatagtggccggacgcagctggctcagaccctgtataattaagtacagaagagtagcatgagtacatatatttaaatatgtacccagtgagtatcccgtctaaactcgaagaagtagtgacgagaggtagacgttttactcactaggtcaaaatactagtttatgacaataaggtttcaggtacaataaatatggaaaacaggtacacatggaacagttaaacaacaaagtaagacctcccgcgtcgcatcaactacaacagtatatgaacaagatcaccaaattccttccaagccagacagataaaattgatgattcataaataaaactctcagacaagtaaataacatatagcatgccgaagcgtacggccgaagcgtcgcaataagttacatgtgcactgccgagggtcgaacggcccgaaccatagatgcatctattaccccgctcacgaatcgatcatgtgacgcagttgacataatgtagggataccccgctcacgaatcatacatgtgactcgggtgctcataatatacacaattccaacaaaaacatcttttaaagaaggaaattccggtatcacattcgtagcataatctataaattaagcttgcaggatattcactaacgtttccataatacctcagaggtgctaactcaccacagttacttgcaaggaaagacagacaagacaagtaaaagcatgcttgtgaatcctaacactacccgacaaagcacagtagtcactatgcacggactctcgtcacttggtacgtgcgtagcccccgcagataaggacatttaatcaatacaattacctatgggaacaattccctcttataaggttggaaatgagacttacctcgtgtagaatctactcctccgatcaagaaagtgcccgaaactccaaactcgtcgctcaaggactcgaaactagccaaatattacttaaatatatcaatatacgctcaacagtaggaaattacaccactaattaggctaattcctcattcttgaagaattcccaaaatacaccctcaggcccacacgctcggtttccgaaaattttcgaagaaaacactgacccataacctaagggtcatttatatgtaaattccttaaggtttcatggtagaaaagtagtgaaatttctaagaattcatcaaccctaggtcttagctctaacccatgattttacctctaatttgatgttaatatacctaaaaggtgatgcaacaagataatatgaaatggaagatcacttaccttttagctggtagatgaaacccctcttgaaaagctctcaaaaatcgtccaagatgatgaaatctggaggaaatgggcctaagtaccgtattaattaggagtctgccttcagctacttctgcacctgcgaccattggattgcacctgcggtcccgcacccacgaccataaggtcgcacctgcgatgaaggccaaggaggccgggggccgcacctgcgaaggggggatcgcacctgcgaaggcacgcctgcggacaaacctcgcacctgcgaggtcgcgcctgcggtgaagggtccgcacctgcgaaatggggctgggggcttctgggccgcacctgcgacctgggcgaccgcacatgcggtcacaccagacctggtgcaccagcaactgatgctgttggtttttggccccgatcggggtacgggaggcccctgggcccacccgagcccccgtgcaattataccaacaagttctgaatcatattacgaactcactcgacccttcggaatgccctaaacaccgctaaaactccgaatcccctccaaaacccctagaatcaaacttaggaattcttaagttttaggatttggtttcaatgcgccgaaccgacctactctatccgaaattccaccaaactttacaggcaacgcataataatcacatttgacctgttccgggaccataatacaggcccggtacacagttttctcattaaatttcattttcaaaatcctgaatatttttcagaaaacaatttcctttaaaaattcatttctcggtcttgggacctcggaattggattccgggcatacgcccggatcccatattttcctacggaccctccgggaccgtccaatcacgggttcgggtccgtttaccaaaaatgttgaacaaagtcaactttaagtcaattaattatagaaattccagtttttcttcaagttttcacattaaagcttcccggttacacgcccgggctacgcacgcatatcgaggtgagattaacggaggctttgggggcctcgaaatgcagatctagctaagttagcacaggatgactgtttgggtcatcacaacttgattactagacatgattaatagtgtgcacatatgaaaaataaacctagagaaacatgatatctacccatacttatactttagcatgtataccccacccattttcactatccatccccagaatagtatttacaaattattacaagcctttgaatatgaattacataattaaaataggaaaagaagaagttaactatagggagccttccatagtaggccaaagtttccggatcctcagtgccatatactgttgtttcacaacctttcataatccgggtgtatcagaattccctaaggatctcagaggatcccgggcagtgctcacacccagatttcatagccgaaatagagtaagtgcagtgtggaaaggccaacttttgtgtgtcaaagttcagagagagctcaaggatcgcaaggcaatgctcacacaagaggggaagatcctaaggggtctaagattatagtgaaagtgcaggatgtgatttgaaaagagttaagtaggaaaacaacttttgaaaatgaattgttcgaaataagctttgaagaacaatagcagagtttactgaaaatagtttgaaagggaagagggtaagatgatcagagtcgtaggattagaacagtacacatagaacaagaaacaagaaccaaacgagtttaacaatcacaagcagggactgaggggtaggggacaagtatgaagcatatagggaaacatacaacaagaagagtcacatacaggttcagagaaaaggttttgggtataacatgtgttcaggattacatagagactaagtaacatatggtgcatattgtagtatactaggaatcaaaaagacataagtgaagaagaatcatgttgaaacatgcaaatgagggtagtaaacatgttgaggctaaatggggaggtattaagaactaaagcagcaaggcatatagactaattacaagtagagcaacaaaaccaaaagtaaagaatattagaaagaagacgaattgaaataccaaagaaacatattgttttgaagctttaaacataaattgaggacataccagttagaagatagtaagcgcataatgaagaataggcaaatagactaaccaatcttggcttgcagccgactgataatagcaggtaatcaagagaagaacagtagagagtatgtatgtatgtaagagagagttgaccagtgtgtgtgttcgtttgctaatgagagagtagagtatatatagttttgaaaataggcagagaatatggtaacaagtactagttttagcataaaaatagaattagaatcaattaatataagtactccctttaattaaggagtcctaattcaaacgggtacaacagtgattaaacaaggaaagatacttaattgaggagttgattcaatcatataaagagtagtaaagaattgagcatgcgattaggactagatacagaatatactaattaaggagagtatacaagaattaattgacatcatgtttgctcacagaaataaggcagaagataattcaattctggaaatcaatcgagagaatctcgagtgagattcaaatcacagggaactaggactaattaagaaaaatatcacacaagcaaggaaatactcaaagtcaggaaaccggtattactcaaaggaaaatatcacaattttaaggaattaaaaatcagtaaagaatatagtgtaaagccaataaaggactgatcacatagattcaaaaaatggtaaaacgatactagaagaactcgtattagtcaaacatcagagaccctaataaggaaattagggattcctatcagagaatagcagataatgaaaggaaccagtagacaatcatagtttaggcatgagcgacaaagaatcaaaaccctaatagtgacaatagagcaagaaatcaccagagcacatagaatatatataaaagtacaatagctatgctagaacaaacaaacaacatcgcaaaacagactcgaatgctcagatcgaacccagaagtattagggtttttaacaaaatgactcaaacagaataaaaagcctcaagcaacatttaaacatgataaaatcataaaataatgctggagaaaatggcatgataccggggagatgagtggaaccgcctctagatcctctgagggcctcaaggtggtgatacccggcgtagaagtgaagcaaaggccaagggattatgagaggataaagtttctggcaggggaaggggccggaggaggtgaacgggctccatcagagatgaagacacgagaagtctctagagagaatcagggagatagagagagagagagagagagagtagagagacgagtgtcaggagtgaatgagggacgggggggggggggggggtagtctttaggtctaatttaggtaagtttttaatctgggccgttgatcaaaattgatcaacggccaggatttaacaagaattgggtcaggtgtgataaggtattgggcgtagggtattttgggttattcaattgggtactgggctggtcaaattgggtagggatcagatttaattggggctagaatttaaattaaaaaaatggctagttgttaaatactcaattaaaattaaaactaaatgataattataaaaattgagattgatgattactaaattaaattaaaattattaatcggtatttaaaaatataaatgactcagtattagatatcaatagcataaaacatatggttaggctataattgcaaaattattgcaattatagccaaacgtgccaatttgaccaaaataatttgatcttaataagaccaaaaataatatattaagtcaaaaaatcatttgtaatgcaatttataattaattattagagataaaaatactggataagttagatataaattaataaaaatatgagaaaattatggaaaaataccaattattatggaacctgattttgaaggtatatatgcaggtttaaaaatagtttgaggaaatattgggtatcaacatcaactaacagagctattgcacccagtgatatcgccatgaccgttcatgaaatggggcatggacatagtgggacccctttcccgcagctaacggaaaggctcgtagatcatagaattcttcgaaagctggcaaatcaaacgaatcacttcgtcaccatatcaccctgtggctaatggacaagccgaatcaactaacaaagtcatcgtcaacaacctgaagaaacggttggaaaaagccaagggaaattggcctaatgagctaccgacaatattatgggcttacagaacaactcaaaaaacatccacgggagaaactcctttcgcacttgtttacgatgtagaggctttgatatcggtggagatcgacgaaccaagcacaaggtttacaacagccacggaggaagcgaacaacgacgagttaagaaccaatttggacttgctcgagcaaagaagagaagctgcactaatacgaaatgacagctcagaaaaaaatcatagaacaatattacaacagaaaatctcatctcagatatttcaaaattggggacttcgttcttaaaaaagtctttcaatcaacgaaggaagctggtgcagggaagttaagtccaaattgggaaggaccctacaaagtccgtggcattgctgggaaaggtgtttatgagctggaagctatggacgacagcatttaaaaaagtattacttctaagtgaaaggaatacccccggtcaggtatcattacgttcgattttatatttgaacaattaaaattttactaaccattttagatgataggcaaaaagataactcataaacagatgataatattagacctgcaaagacgcgaggaagtaactgaattcccggtctagggttacactttctgattgacgttttaaagggttaagcagtcatcatcgaaaaactatatacctttgagtcccgtatgtttttccttttcaggaaaatgaccacaagtcaaagacgaagcaaaaaagactatcaaaaagtcaaagctcgagcctgaggatccatctacccaacaagtcaagtgatacaagcaaaatcaaaagagctaaagactcaaaacacaaagcctgattcaaaaaaaacttcgaaaatatgttcataaatgtaaacgaatgttcaggttaaaaggaaaaatattagttacgagggaaaaatgcacgtctttgtacttattcagaaaactgttgtaattaaaaacagttatggataaatatcatcatctttgtacttattcagaaaactgttgtaaataaaaacagttacgaaatctttgtacttataaagaaaactgttatgaataaaacagttacagatgaaagatcattatccttgtacctattcaaaaaactgttataaacaaaaaatagttatggatgaaaaaacatcaccctcgtatttattaaaaactattgtcaatgaaaacagttacatgttaaacccatacccttataaaaaatgttatgaacaaaaaatagttattcccttgtattaacgcgaaaaaattgttacacaagaaaaacagttacgaaatacaagtttgtatcaaacctgttaaaagaaaacagttgcaacatgagttttagacgatacgcaaacacatgtgaaatgttacgaaagttcaacacaaaaactttcttcaaaaatattgttaaaaagaaacatgtgaaaaattcctatctctctattgcatatttacaccattatgaagttgagacgtcttcttcattaagtgtcgataaaaaaaagggccctctttcacaaaccgtacctactacaaaaaagtacggataatctaagcattttatatgaaaaactcagaggtaaaacttaaacctcaaaaataaagtatgcaaaagacttaaaagagtgaaacaaaaactcaacagaaattaaagtcatacttgcattaatatatcaacggcaaaataaactaagtattaacttagtcttggccgtattaagtttttttacattaggtgcccctaagttgtcaattggggacttaaaggatccaaacttacccccgatgggactgggggtaaccaccaattgatacaaagaaaaaaaaagagaaccaagatcttaaacttcttcagatggggggttgtcttcactggcaggaggagcagcttgggatgaagagacatgagcagcaggagcctcaccttcaggtgaagagagattttgaccttgttgagacttttcaatggtctccttggtttttgcaatttcggtttttaggtcaaaaccctcttcgctcatttccgtcaatgtgtcgagacgagagttcatataagcccaactgacatcaacggctgccttgtcttcaagagcttcataatctttctcccacatctcaacttcagctcttaattcatccctatcagccacgacagcatcacgagaggcctttaaaggagcgaaagacctttccaggaactgaattttctccaaagagttgcgaagatcctcttgggtttgagtgggtcattgaacaagttcgaccgaacactcctccttctggttcaattaggccttcaggctcctgatctcttcagaggtacgggacagctgctctgcgaatgaggactctaggacgttcgtatccttgcctgcctggtctgaagatgccttctcaatggccaactctgttgtcatgaccctcacttgctgttccaaggtacacttctcctcttccacttcctccatttcgagttgtaagctttcatatttctctttacaattatctgcctcaacacgcaactcccttacttcctgctccgtatgggaaactctcttcattaaccgtgcctataagattgatctacaaaagcagataaattaggtacaaaaagaatgtttgcaagaatgaacgaaagaaagtatattttacctttaaagaagtatgcacaatctcatttgcccatgtaagggaactgtggctgtccatcttagctctcttagtcggacctattaacggtttcagccatacatcaggctggccaaactttttaaagaggctaccctctgctggaacttctatcatcacctgcctcatctcccccctgctggaagaccctacttctgcaacagaaagcacagaagcaggaacagatgagggagccacgggcaaggaagtctgaggggcagaaaaagccacgggagagggagcaacgacaggagcaggaatagtcatgggagcatgagtaataacatgagtagttgaggtaagttctttaagagcagaaggagagaaaatagccaggggaccttcatcagcaacagaaccaaaaccttcacggaacaggagatccactgattcacgcacgggagagggagtagcatcctcaggggcagaaagttcagcttcaggcgcaggaggatcaatagcaggtgtagactcgtcgtcagagaccaccttccttctgcgtgacctatggactaaagaaccccctcttcctcctcctcttctaaggtcattgacccacttgcttttctctttgaagaagaggaacctgaaatgatctcctgggcctttgccaaggacaactttggagcagacacggatgtagcagaagctccacgagcaggaaatcctgtcaaatgaaaagggtcaaataaagctcgaaggagggaagaagtaaaaactaaaacttcatttaccgtgagtcttaactctccaaccaaacctcaaggagaggtatttccatgtgcatttttacggagcgattaacaaaagtttttctacccaatctcggaaatcggagacattctcgacggttcccatgattgctgtaaagaaaagaaacagttacggtacatataaagtatctaaagcaaaaggaaaggaatgtgagcaaaattgtactcacgtgcaaaattccacttctcagggaagggaagattttcttcacctactaaaccagcagtaggaacaacaacataccgaaggtaccaccctcgatctttatcgtcatcaggagtcactaacaccctcttgctcctagacgcgggagtaaaaactccctagtggaacaacaattgagaatagaggagaatgagatgatgaaaggtaaaagggaccgtatctaagttatccaaatatctaatacacgcacaactcgccacacgagaggaccgacttgtcccaaacaaattttaaagaatcgacaaaactcgatgataactgggtcgatggtaggcttgaatcgtaatgtgaatggataggtataaacaaaagaatacccagccttgtaataggttattctttgattaccattgggaatgacaacaggaaaattaggcttctagaaacagtccctgcgtacaagaggtatcaatccttcagtaatctgggtagggtacttgtcagcactgtcaagagatgacaatgaagaaagctgatctctaaggacctgactatccctagcaaaggaaaattctgcaagtactatttcatcgacccgtgtctcacgcaaaggttcattgtgttctctacctttagacgaagatctagaagccctagcccttggagaagataaaggcctagaagaaggatggggagtcacttgagaagatgaagaatccctagaaggagtataacctaaactcctaagtctaccacctcttctactccgagttggagcagaagaaggatttagatcatctacgtttatgactttcttggattgacttgaagaagacatatttacagagacaaaaagtttgcaaacaaacaatgaagggctagaagttttttcgtgaaagtaaagaaagaaagaggggtatttatacttgaagacaaccatcaaaaaatggaaaaaacattgatgtgaaagtcataattgaagttgtcacttcgtgactgatgcaaccgcaaaaagccctaaaaggtgctgaataattgtagaaccagtccaggaatgccacgtggcataagcattaaatggaagtgacaagcgacgcctacattcagagatggatacaatgttacaagtgaagcggcggcaaaatattcccgccataaatgaatatccacttaccaaatattaatcgaaaaataaatggtaagtggggggactatctgtattggtaaaaaaaagcttcacacgtgtaacaaatgtggtgactcagcaatctatgtggagtaatgaaaacatgacaactggacagaactctatgaagaggtacgaggcaaagaggcacggaatagcacacccacggggtaattagctacgggaatctcaacctgattgagaagatgaagagacacggtcagagtgaatccgggcagaataaagggaaaatttggagatcttcaattaatgagccagactttacacgaccttcacgcaacagttatggttaatcattgtaacgatacattaatgccattattagtcattaatgctcaatcactgaaaagggtagacgttatattgggaattcctatataagggagtaaagtataacttgtaagggacattcgaactactactgcaatacacttactttttgtgcatcttattgctttccatttacaagtttacttacaattactagtttattctttggttatcataaacccgtgttcttcttaaaatagctttgagcaaagaatccaattttttggttaaacagtcttgtgtcttgggccactaagaaacaaaattcagtagctctatctactgttgaggttgagtatgtgactgcaacctcatgttgtgctcagttactatgaattaaacaacaactgatggattttggtatagaggttggatgcattcctattttctgtgataacactagtgctattagtatgacaaagaacctcgttcatcataaaagaacaaagcacatagatgttagacccatttcttaagagataactatgagaaggggctgatctctattgaattttgtgctactgataaacaaattgctgacatcttcactaaagcacttagtagagagcattttgaaagaaacatgatagaattagggatgattaagatcacctaattaaaccaattcaaaacaaaaatgaaagaaaaaattggctaggaattttgaaatgtgtaaataatcagaatattcattgctcggtttcattctataaaaagcatactctcttgccatgttttaatatgactccttggttactaacgatgtttttctatttttgaaaattgaggcttaatcaagatattctaataagatgaacctagttcatcgctgctagttcatctgacagacgaggtatgtgctcatcactatacacacattgaaatattaatagttactcatgagaaggactctatctataacaagctcttttcaaatctggtactaatcccatatttgaacccgttccaaagagaccaatcaaactaaaaagtcctagattataagagagtcataactgtctcttctcacctgacactcctaaaccgattagactcccacttgaccaaaattacacacgttgtgcattaattaaccaagtctttaaaaacccatcatcacttctctaattcttcactcacttttcttcctaaaagacataaccgtcgaaaccctttcaaccttctgctcaaacactttgatcttaatctttttctttaacaaaaatcataaccatggcttcctcaccacctccttcctcgtcctcctcaactacaactgactacagtatccctcttcaagatactggttcaaccccatctcaatcacatcccgccacccctcaacacaatcatcttccgtctcctcaaagttctcacattgtacaaccaagccctaatctagagcccaggagaaggcgtgtaaaaatgctagccagaaagattgtggcctctggctctctagctaagaaaatgaacgctaagcttcaagccagccaggctcaagaatctaaaaactcaaatgactctttccagtccgccaatgaggaggaagcaactgggtcatccgatcttgaacatgtaacatcaactcctaaaattgggtctgagcctgaaccagtctcttctaaaaataggtttgttctaattgggtctgtagtggatgtggaaattcctgataggcgaagaagaggcggtaaaaataacattaggaaagaaattgagagaggggggagaagaagttatgtgaggggaacatgggtagaaagtactctattggcagtttgtggtactgaagatggtgccaaggatttagggggaagtaacttaagagaggctgcagaggggctggaaaatcttcaacatggaattgataaacctggttcatccattgaggaaactttggctgatcttatgagaaagttaggggagagctataaacccaaaaagaagaggacatccaataccaataaagccgacactccagtggaaagcaagaagagaaaagccactccctctgctgaaacttccatttctagaggtcgcattacaaggagtgcaattaggcagagtgaagaggagttgcagaatctctgagggagagtataagaaagaaagctgaaaaggttaaggcaaaagtgtttgagcccgcaaaggctattgatgttgaggagatggacccggttcatcaagaggaacaaatggcagaagttgaggttgagacacccaaaccaaagaaggacaatatttcttccaataagtcagtatctgtgtatgctacaccctcgactgttgctaagaggactatgtctacaaagaaatcaaagacggttcagtttgatgatgatgatgagtggagtggggatgaagcacaggagtatgatggagagatagataaattgaccaaatttggaaaacgcactatactgaagggaaggttgttgaaggatctggaagaatcaagcatgatttacctattggacactctggacgtgcagggttggaaggacatggtccttcagcttgatggcaggctggtcaggagtgagatcgtcgagttcatggcaaatgctgaggtcaaagatggcagggtctccagtcaagttaaggagactaaaatctcctttgatgccaaagagttgggtgaaattatggggattccagttgagggttatgatgattatacaacgcagtggtggccaagcttggatggtcttccttcagcactgcaaattaccagaaggttcagtgataatgctgaagatgtggaacccagggttgtgtacaaaagcgatatgaaaccccagcacaaggtggtttttgagtttgtcaataaatgtatactgtccaagcaagagaggaggcacatagcaaactatatggatttaactctcatggaatacctggacagtggaaggcaaatcaactggccatctttcatcgttcagttgctggacagggtggtcaatggctccaaggcccatgctatcccatatggtttcatcctaacgattgtgctggctcacttcaaagtacccctgaagaaggcagagatggccactgttaaggaccattttgggaagaacacgcttctggcatatgactacattataaatgttcctgatgatgaacctggttcatccagaaaaatgtctgtgaacagcaaggtcaaggcgcttgtacattaaggtggggttaaggatgctgaaatcatttaactgaagacccgccttacagaggttgaggctgagggagatgctctcaaagctaaattggccaaggagaaggagaaaaagtaagggattcttcaacatatgctgtctcttctccaagcaaagaacccaacctcaaccccttcccagccttaggtgtccagtgtctgtcttcacccctctatgatccagattcaggattttttttctattgtttgttcatggttgtaactgctcttatttctttgtatgtttggtggctgaactatgcttatcttaatggattttgttgtttctaatcttaatttttttgtctcacttttcttgatggttgcattcttaattcaatattgatgattaatccaagttgcacttgcagtttccccagtggccatgagtaatcctaatgaatatggtaattctaacattttgcaactttttgatgatgccaaaaggggggagatgtgctatacttagaatatgttatatttgtaacctaatgaacctggttatttatgaaaaatgcttaatactctaaaaagtgtcaatgttagattaaagtggctacaggcctaagcgcagagtttgtcataatcaaaaagggggaatttgttggatcaagaagtcgaatgattttgaagattgacaatgaaactcaaagttgaaccaggcccatcactggagacacagacacatgcagagttaagggcacgtgaggtgcacaagcaggagataaacgaaatttgtgatctaaagagatatctcctgatcgaaaaggttgcaaattgataaggaaatgtactccttattcattaagaatagaatcaagataagggaggatttagggagttgagaccaactagaactcttccaccaaggaagagtagcatctgaattctagtgtatctctttgtctactaaatactatatattgttcagtgttcttattgtatagcagtgcacaaacacagaagcaaaacaagaattaagagcaaaattaccaaagtaatttttcaagtagttcgtgtgagaattgagtgtgcaactttgaagctacttgaaccagctagaagaaccagttccatctgttgtcttttagtctagtttaattgtagtaggtgattacaaattgtatctttcagttttatctagaagcaaatagtagtaggtactgagtgttcaagttagagttaacttgaagtttatcgcaaatagctagaggctagtttgccacaaggggattagagttagtcattatgtttacaaaagagtttattttgtaaatgctgtttggctcattgatttagtgaagagtttgagaaaatcctactgggaagtaggccgtggttttttcaccttttgagccaagtgtttttcacgtaaaatcaccgtgttctttaaattctgcatttattattccgcaaactataggatttgaaacacatagaagaacctggtccttctataactactgcacgcaaaaattggataccacacaaatcacccccctcttgtgtggtattgacgtttggaacatcattcttcctctccctatactgctccatcaatctcctaacacggtagatggcttctatagttgaacacctgacatgaacccgaactggttctcggaaatagacacactcctcctcatccttatctctaccactctctcccagactttcatagtatggctaaacagcttaataccccgatagttatttcaattttggatattacccttattcttatatacagaaaccatcatgctctacctccactctctggtcatcttatttgttctaaaaatgaaattaaataaccttgtgatccactctaagcatgcattgcccacactcttacaaaactccaccgggattttgtaacgacctgacttgtcattttgagaattagcgtcatgttcagcggcttaaggtcttgagtagcttcacttcatgtattatgacttgtatgtgtagtcggaattgaatttcgggaagcttagagttaattcggaagaaaaaatctcaattcggaagctttaagtcataagagttgaccaaggtttgacttttgggtaaatggtatcgaaatcgagatttgaaggttccaataagttcatatgatgatttcggacttgagcatatgttcaggttgagtatcgggtggtccgggagcatttcggtgctgtcatgacccagaattcccaccttcgggatcgtgatggcgcctaacatttcacttgctaggcaagccaacgttggaggatctttaagctaattttaacaaaaaaataagtaaaatcaattaagctgaaaaatgaagctaaaactgttgcggaataacataagaatccaataatatctaagtacaacacggatctggagtcacaattcacgagcttctagaatctctacaaatagggtttgaaataaatacaactgttttgaatgaaaagaatagtaaagtaggggaagcggaaagggaattcaaggtctgtggatgccagaagatcgacctcaagtctccaaaagcaaatacgagctgaaaagtctcacgaacaattgggaccatcaccaaaatctgcaaaagaagtgcagagtgtagtatgagtacaaccgacccaatgtactccgcaagtgtcgagcctaacctcgatgaggtagtgacggggctaagacaagacacccacgtaaaataaacctgtacagatatatgtacattataacaacaaataaaagctaaacatgtgattttgggagggaacatgtgaaaggggtacaagatacgataaataccacagggaatgataacataaacagtcaataagcctttaagcagcaaatgaataaaaataatgaataaaatggcacagaatcacgcttcgtgattttactctcaacctcattatgaaacaataataacgacacgacatcacccttcgtgcttttactctcactttcatcataaatcaatagatatgactcggcatcacccttcatgcattaacactctcatatgagacgacatcacccttcgtgcattaacactctcatatgggacggcatcacccttcgtgcatgaacactctcccttaccatgtaacaatgaacatataattaaagagagatagaataagcaagaattaaagagagatagaataaacaagaacatgcctcacatcagcaatgtttccacaacactaacctcaacttcgaaaaattatactcaattatctcaaatagctcataagtgcgaaaagaactatcaatttagtaattaactagtctaagtgtggatatcatgatcaaagaaagaaacaaattacaagaaaagaagtcccacacacatactttgacccaacaacaacacataagtattcgtcacctcatatatacgttgtacccaacatctaaacatgtagcaaatagtcaatctgatgttttagacttcaatactacacaatattacaagttaattgtgcattacccatttttcgagtgctgtctaataagaagaacctagttcttcttagtatactacttactactgtttgcggaataattaagcagtaatagtaaagatgtggagatttttacgtggaaaacacctggctcaaaaggtgaaaaaaccatgacctactcctcagtaggattttctcaaactcttcactaaactctgagccaaaacggacttacaaaataaaatcttttgtaatcctaggactcactctaatcctctttgtatcaactagcctctagctaatttatataaatttcaagctaactctaacttgatcagtttgtacctattacaattgcttaaatgaaagctgataagatacagtatttaaactcctactacaatcaactagactcaatatacaaacaatggaactgtttcttctagttgaactgtagcctttgtatcgcacaccaattctgcttgcaaaacctctggaacttttgcttcagaacttgattcactttagcacttgtgcgtcacatctttcagcagtaatacattgattatttatagagtccgtttgttgagtccatgattcaattctgatccaactcttccttggtaaacgagtttgattgtaactcaacttccttcatctatttctgtcctagctgaaatcaacttatgtcttctcttatcaatttgcaaccttttcgtattaggagatattctcttagttctttgatacttagcaatcactgatatctcctagaattgtacgattcgtggtccaactgcttcattcagaagtgtatgctatgatggacctggctcaactggacacctcttgtcaatcttcaaaacccattcagtgacatgggtcaacaaattccccccttttgatgatgacaaactctgtgcatttatcctgtatacacatccaacactttgtatttttgtgagcattaatcatcaagaatcaagtttattaggttataaatatcacttcaaagattttaaaattttaaacaatactacaacacaccactgtagcacatcttcccccttttggcatcatcgaaaagttgcaaaatgatacttaccagtaattaattcttactcatggccaatgtaggcaactgcaggtgcaaacatgattaatcaacacaagaaaccaataatgtaagctaaatcataaatagagaaatttgtcaaaacaccaagctttcattagattaacaaggattatcaacaccaaaacagattaaatcaaagacaaccaaaacatgagtacaccagaattaaaaattgaaacaaacacacttgacacagtcccgaactgggcacttgatgggataagagggggtagttatggaaattcctaagtttggggtggtgcagaagatgcaggattcttagtttggagaagatacatcatttggtgtaagacaccctcatttttctccttctccttggctaattcagctttgagagcatcacgctcaccttccacctcaagtaagcgagtcttcaaacgaaggatctccatatcctttgctcgttttcttgcaccagagtacggaccttgctgttgactggttgcttccgagatgaaccaggttcatctgtcggggcactgacagtgtaatcacatgacaacaaagtgtccttcccaaagaaatcctttgcagtagccatttcagccttctttgtgggaactccaaaatgagtcagaactgtagtaaggataaagccataaggaatcgcataggccttggttccatttaccactctttccaaaagctggatgatcaaagatggccaattgatctgcttgcctctgtataggcactccatgagcgttagatccatatagttggcaatgtgcctgcgctcttgtctgggcagcagaaatttaataacaaactcaaagaacaacttgtgttcaggctttatctcgcttttgtacactgcccggggctcaagctcttcttcattgtcacaaaagaatctggtgatgttgagtgctgaggccattccatccaagtaaggccatctctgccttgtatagccgtcatatccctcagatggaatgtctagaatgactcccagttcttgagcgtcaaaggagacttcaactcccctgaccaatgatgtaacccttcctccaatcacagtcgcattccccatgaattccactacctcatttctgaccagccaaccttccaagcgaaggaccatgtccttccagccttgagctgccagaaaatccactaagtacctcatacccggctcctccaagtccttcattaactttcccttcaaaatatgtctctagacaaacatggcaactctgtcaatcgacacttctccaacctccttctcatcatctccactccaatcaggatcattatctttctcaacaatctgaactttcttctttgactttactttagaccgtgtcctcgtagatgtactcacggtggtagcagacataggtgttgacttctttgtggaagtcttagccaatttggccttgggtgtcttgaccaccactggagcaacctcttcatcttgttggaccaggtacaccacctcatcaacagcaataaccttaacaggatcccctactttcgctttccctttctcagtcttctttcttttgctctcttgcagagctttttctagcttctcctcctcttctcgaacagtatttctcgtagctcgtacccttggaacaggtacaccaatagactcatcaattttccttttctttgagactttagacttgatggacttgggagtacatctcttcttggggttgtatgagtcccctagtttcttaagtctctcagcagaagaaacacgatcatctatctccttcattagcttttctaattcagcagcatcttcctcaacttcatgagttccccctatcactacgacatcatcttcaagattctcaagaatgaggccacaaatctcaagtgtggaaccatccttcccaaatcccctcacacatgcatatcccctattctcaagaattttcccagtttttctttgcctacttggcacttccacatccaccacaagcccaaccagcacaaatctattttcagaatttaacacagaggtaacttcagtattacatttctcaacacttgacgaaccaggtgcatcgtcctcatgggctgatttaaacgattcactggacgaatctggtttgggttcttcttcagcctgtaataaatcttccaagaactttgctcgtgaccctgaagccacagattttcgtgcaagaaccttgacatgaatgggtttttgggttgggatagggtttgatgtaggtttaagagtatcatggtattcaggggtttcaggtgtctcagaggattcgaaattgtagattggtggagagtcagactcatatactattgtagactggtggagagtcagactcatatactccctcatcgtagtcacgattttgagaatcagatgaagcagacgacatttttaatttttagagaaaacgaagagagggcaaaagtcagtagaggtttgagtgttgagagacttgaacagggttcgtctattgctttattcactatgggtaatgatggccaatttataacttgtggctggggtgattataacggacgagtattaacacaagtaggatactaatcgatgaagtactgtcagtgatttgacattgattagaccgtttctttccccctaaaactaggctaatttattgtgacggaacttcttgaaactggttcattatttgggtaagtacgagaatatgaattgaaccataaatggatagagtcctactcatgtatgactgtacttgaattaatacctgtatggagatgagaacgtaccttgtcagtcatgtaaaccatcatggatgaaccagcttcatcctgttaaaaatctttattttgcctcaattcacaaatggagaaacatcattagcaactagggaatcatattaatacatggaagaagagtatgacaacaaagacatagagctgagcaatgattaatctgattaagtacctaattaaaaattctatccagaaaacttcctcctttttttttcttcaattaggtgatcttaatcatccctaattcaagcatgtttctctcataatgctccctactcaatgctttggtaaatatatcagcaatttgatgattagtggcacaaaattcaattgagatcatccccttctcataattatccctcagaaaattgtgcctaacatctatgtgcttagttctcttgtgatgaaccgggttcttagtcatactaattgcactagtgttataatagtaaataggaattcatcccacatatataccaaagtccaggagttgttgcttaatccataacaactgagcacaacaagaggctgcagccacatattttgcctcagcagtagacaaggctattgaattttgtttcttggtggcccaagatacaaggcaggagcccaaaaagtgagccatgcctgaagtacttttcatgtcaaccaggaaacctgcataatcaacatcagcatatcctacaaggtccaaattactacctttaggataccaaaggcacaaatcagtggtgcccttcaaatatctcaaaattctcttcactgcagtgagatgggactcctttggattggattgaaacctagcacatagtcccacactgaacacaatatcaggtctacttgcagtaagatatagtagagatccaatcattcctctgtacgtcttctaatcaacggatgaaccaggttcatccacatctaattttgtagctgtggctattggggtatctatctcctatcttccattttgaacttcttgaggagttctctcacatacttctgctgatgaatcattgttccatgtggagtttgtttgatttgcagacctaagaaaaaggttagctcacccatcatactcatttcaaactcactccccattaatgaagcaaattccttgctgagcttctcagttgttgccccaaatatgatatcatcaatatatatttgtacaatcagaagatctttttccttttcctttaagaacaaagtactgcctattttgcctcgtttgtacccatgttccagcatgaattttgacaatctctcgtaccaagctctaagtgcttgattgagaccatagagagccttgtcatgtttatatacatgatcaggtgattctttgctttcaaaaccaggaggatgttttacaaatacctcttccttcaaataaccattgagaaaggcactctttacatccatctgatgcaacgtgaattccatgtgtgcaacaaatgctataagaagtctgattgcctccaatcttgccacatgagcaaaggtctcatcataatcaattccctcttcttggttgtatccttgaacaaccagtcttgccttgtttctagtaacagttccatcctcatcgagtttattcctgaagacccacttggtgccaattattgatctgtccagtggcctgggtaccaagttccatacttgacttctctcaaattgattcatctcctcttgcatatcagttacccagtcagcatctttcaaggattcagcaatgttctttggttcaatcagggataaaaatgcatcaaacacacatagatttttcaaggaggatctagttttgattccagatatcaggtctgttatgatgttctcaagagggtgagaactctgatatctatgtggtttgagaaccagttgttcacttctgggttgttccaagttgtcttattgttgtggaacaggatcaggtccagtattttcatgaggaattccccctgtcgagttgcatggggttgttggacctggtccatcacctgttccatctcccataggtgcttcaatgtagtcattgctcctcaccagtccaagctcctcatcttctggttcctgtctctcagatagagtgttagtttcatcaaagacaacatgtacactttcttctgcacacatagttcttttattgtatattttataagctttgctctatgtaaaatatcccaagaacactccctcttcacttctggggtcaaattttcctaaagaatctttttcattattatgcacataacacttacatccaaaagccctaagatgggatatgttgggctttctacctttaagtaattcatagggagttttctctaccagaggtctggtcatgcatctattgataatataacatgcagtgttaattgcttctgcccagaagctgtgaggtagtttgcttgatagaagcatggttcttgccatgtcttcaagagttttgtttttcctttcaacaaccccattttgttgtggggttctaggagcagaaaaaattgtgattcacaccatgttcatcacaaaactcagtaaacttagcattctcaaactcagtaccatggtcagatctaatggatgctagttgatgtcttaattgattctgaatcctcttgacaaatgaggtgaacatttcaaatgcttcatccttagatgccaagaacaaggtccaagtgaaccttgagaaatcatctactagtaccataacatatctctttccacctctacttagagttctcatgggaccacagagatccatatgaactagttccaacgacctggtggtactgaccattttcttacttttgaaagaagaccttacctgcttcccccttgcacgtgcctcacaaaccttgtcttctttgaacttaatgttaggaagccctaccactaagtccttagagaccagcttgttaagttgagttagacttgcatgaccaagtcttttgtgctacaagaggggatcactgtccaacacactaaggcaagtgagttcattgtcagacagtgtggacaagtcaatgacatagatattgttcattctttttccctgcaaaacaatcttgtcagtaagcaggttgatcacaaaacattttgtggaagtaaaagcgataaggttacctctgtcacacagttgtgacacactggtaaggctatatttcaagtcgtctatcagatacacatgttcaattgaacgtgtgtcatctttacctaccttgtcgacccttattatttcacctttctttccgtttccaaaggagacatttcctcctttgaggttttcaagtgaaagaaaccgttccttgttccctgtcatatgcttagaacatccactatccaaaaatcaaaactggttgcctcccttcacttgtaccttcaaaagaaaatcaagggttagttttaagaacccatactagtttgggtccttttccatgagagaatggatgaatcagatattttctggcccaacttggtagccattttttctttttaatgaatctctcatttttctgactggccttttcctttgcagaacactcatatttagagtggccagtcttcccacaatgggtgcaaattttattttcagggagagtgagatacttgcttttgggatcccatttaggcaattgactcccaaaaccaagccctctccggttgctactatgattctctttgagccatattaaagcatcagaagacttattccacttatgtgttctatcaaattcatgtttgactttgccaagttcttctttaagagattttatctgctcatctttggcatacattttatctttcaatttacctaagtcttcttctaacttcgcatgagagtgatcaactatctttttactggatcctagtcttaactttaaattttcagattttagttctagaatctcagtttcgagtggttgaacctggttcatcaagactgcgtttttcttttcagattcactgacccttatttccaggtccatgcattttactctcagcatttcacactctttagatagttgatctttctctttagttgtctcctcagaatcatcaatgaagtcaagtagcaactcagagagtttctccttagatagaaactttatttttgttttaagatgtgagatacttacatgcggttcttcataagtctcctcatcagattctccaattgccatgagagcttgatcttctgtctcaccatcttctgattcttcatctgaactttcccccaagcagcaaccatagactttgtagtagttttcttgggttggaccagttccttcttcttgttatttctttcatctctctccttcctccattctacttcccactaggggcagttcttgatgagatgatcagtttttccacacttgtagcatctctcattagctggcctttcaggagcctttgccttgttgaagtttccccctctagagatgcctttcttcctcatgagaaagtttttgaattatttggtgatcatggtcatctcatcatcctccatatctgctccctctatgatccttagtgctagaattttttccttctttggggcatccattttcatggtctgccttctgagttcataagcagtaaggttgccaatcaactcatctagtctaagggttgccatatttttggaatcatgaatggcagttatcttgctttcccaggagataggcagaacccttgtcaaaatcttctcaaccttgtcttatttaaggatgactcttccaagagacttgagttcattagtcaaggttgtgaaccttgtgtacatctcctgaattgtttcaccttccttcatagtgaatttttcatactgagagtatagcaatgtacctctagacctcttcacttgagctgttccttcatgtgccacttgtagagtatcccagatttccttggcagtggtgcagctttggattctgttgtattcatctgggcctagtccacacactagccacttcttggccttggcattcttctcccatttcttcagatcctcaattgtgcagtcagccctagttttaggcacatctactccttcagcagttttcttcattgttgcaagtggaccatcagtgactatgtcccagagttcatagtcctctccaataaggtgatccttcattctattcttccaccaagaatagtactgaccgttgaagagtggtggccttgcagttgattgaccttcccagttcccaggtggtgcactcatcttcatgttttcctaggtgttagcctcttcaagaataacctgctctgataccaattgatgttttagacttcaatactacacagtattgcaagttaattgtgcagtacccaattttcgagtgctgtctaataagaagaacctggttcttcttagtctactacttactactgtttgcggaataattaagtggtaatagtaaagacacggagatttttacgtggaaaacacctggctcaaaaggtgaaaaaaccacgacctactcctcaataggatttgttcaaactcttcactaaactctgagccaaaatggacttacaaaataaactcttttgtaatcctaggactaactctaatcctctttgtatcaactaacctgtaactaagttttacagatttcaaactaactctaacttgatcagtttgtacctattacaattgcttctatgaaagctgataagatacagtatttaaactcctactacaatcaactagactcaatatacaaacaatggaactgtttcttctacttgaactgtatcctttatatcgcacaccaattctgcttgcaaaacctctggaacttttgcttcagaacttgattcactttagcacttgtgcatcacatctttcagcagtaatacattgattatttatagagtccgtttattgagtccatgattcaattctgatccaacttttccttggtaaacgagtttgattgtaactcaacttctttcctctatttctgtcctttctgaaatcaacttatatattctcttatcaatttgcaaccttttcgtattaggagacattatcttagttctttgatacttagcaatcactgatatctcctagacgtgtacgattcgtggtccaactgcttcatttagaagtgtatgctatgatggacctggttcaactggacacctcttgtcaatcttcaaaaccaattcagtgacatgggccaacacaaacaagtcttaatccctcaagtcaaggttaaccacgacatttccctcactccaaagaccaactcaaagctctaccttttgaaaaaacctccgaaccaaccaaatgattcaaaataagccttaggaactacctacgaatgaaaaaggttcaatttaggtctttattgaaaaagtcaacaaaagtcaatcccgggctccttggtccaaacccaaaattcggaccaaaacttgattatccattcacccccgagcccagttaggtaatttgtttcgaaatccgacctcaatttgaggtctaaattcaaattttacaaaaatccctagtttttcccaaacccccaatttccatcatgaaaaatcctagattttaggttgaaatcttatgaaatgtaatggaaaattaaaagaaaataggttagaatcacttaccaatgaaattgggaagaatggatcttgggaaaatcgcctctagggttctctaggtttgaaaatttgaaagaatgaaataattcttgtctaactcaacctttaccgagttgcaggtgtcgcaatcgcgatatcatgatcgcaattgcgaacatcgttgcgagaaaaaggtcgcaattgggaactcctctcatattcccagtgatcacaatagtgataaaatagtcgcaattacgaaaccttatgccctcacaaatgcagaccactcttcgcaaattcgaagatcttcaaaatagcgttgagtcgcaattgcgactctgccttcgcaaaagcggaactgccaaaatcgcaattgcgaactcttcctcgcaaattcgaggaccccccaaccattcccgggctcacaaatgtgaatgatcgttcgcaaatgtgaggctcacaaatgcaaatgatcgttcgcaaatgcgagatctgcagcatacaccagaaactacatgcaccagctatgattctaagttcaattgcactctgtagcctatccgaaactcacccgagcccttgaggctccaaataaaatatgcacacaagtctaaaaatgtcatacgaacttgatcacacaatcaaatcgccaaaataacacctagaactatgaatcgaacaccaaaatcaaatgaaattttcaagaaactttagaacttctattttaacaagcggacttccgaatcacgtcaaaccaacttcgttttttttaccaaatttgacagacaagtcataaatatagtactgaacctataatgggttctagaatcaaaatacagacccggtatcaactaagtcaaaaattggtcaaacactaagtcattaagcctttaaacttcaatttttcaatagaatacgaaaactcgagctagggacctcagaattcgattacgggcatattcccaagtcccaaatcatgataaggacctacagagattgttaaaataaggatccgggtccgttttctcaaaacgttgatcgaagtcaactcaaatagattttaaaaccaaaatctcatatattatcaatttttaacataaaaactttccaaaaaaaaatggactgtgtacgtagatcgagaaaggctaaaatgagatattggaggcttcaaaacactaatttaaggtttgaatctctagatgacctaccgggtcatcacaagtgcttattatggaatgttgacattttgaaagtttaagaatttcttaagtttgatttgaagtgaattttgatgttatcgatgtctgtttgggattccgagccttttaataagttcgtattgtaatttgttacgtgtacgtaaaatttaaagccattctgaaatgtttacgtatgattcaaacgtgttcgacgaaggatgaaggtttgaaagttaatagagtttaagaaattgagtttggtccttaattattggtctcgatattttaatgtgtgttctgagccttcagacaagtttacatagggtatataaacttgttagaatgattaaacagggttcctcagagctcgggtgagtttttgggtagtttcggaccacctttaggccttttggaactaccgataactggtgttggaggtgtgctatgcgatcgcggaggtttgtgccgcgatcgcggagaataaagtgcaatccaggccttgtgaattgtgaacacggaaggaagggtcgtgatcgcgtagaaggaaattctgatgcattaacccaactttggaagcttatatcttgcaatctataaggaaattggagatgcttcaataatcaaaaattgttgccctctgtgtctgatttttagaaaattaacccgtttgtcatttggatttttgtacaaaaagttatggtggatatattacaggctctagaaagagtttggaaatcgttgttgaagaatttgttcatcctgaatttggaagcttgtatcttgaaatctataagcaactttagagttgacctaaaaatgaaagttgtagtactttgtgtctagttttcaaaaaattaaaccgtttggcatttgaagttccgtacaaaaagttatggctattacactacatgatttatgagaagagtttgggaagagttaatagaatttgttcattgtgattgggggggaggggggggaatggttgcgatcacatagagaaattattctggaaaatggtgtgcttcacgatcgtgaataattttccgctatcgcgaagggtgaatccttaaacagaacatatatttgggggtttggtcattttcttcatttttggatttttggagctcggttttgggcgattctggaggatttttcatgggtttgagttgggtaagtgttctatgattgtatttcataattccatggttatatttatcatttatttcgaatttaatggaagaaattgagaaaaaatgttaaatctttcaaaaatgtaaaatggagatttggaggacgattcgttattagaatttgataattttggtatggttgaactcgtatcggaatgagtattcggattttatgaatttacgccgtgttccaagatgcgggcatcaagttgaccttcgagttgactttttaatgtgaaaattgaagtcgacgtttttttatcaaaaattattttcgatgaatttaaagaatgttatgtaattaatttggctagatttgagccgtccgaaggtcatttcatgtgagaaggctattttggaatgtcggcctaacttcgtaacgatacgtatcttgcctaaccttgagtaacggaattaccccttaggcattgagccgtatgcgacatttgtgtaatgtgaaagtcgcatacgcgaggtgacgagtacgtactccggcttatatgtgcaaattatattagtttaaactcttagtcatttttgtgtattaaattggaaatttgttggcacttattaaatcacttatttgtcatgcctcattcattgcttgtcgagtttgttttatatgataatttggtgtgactgctaatttgacttttacgtgaattccgtgttttgttgagttgccatttcgtgaaaataatctgcaaataattaataaaaattcaaaaagaggcattaatctatttacctaaatttggattaaagaaggcgttgttctatgctgagttatttttctatccttgttgttattttgagattttatatatgttgtgggagccttgggctatttgctgtgaaattatttgattttgttgtatctttgaaaaggttgtggcatatgggcaatttgtaacatgaactgattttgttgtgttgttgtgataatattccgtgtgaattattgtgtgatttgagttattattatgcggacataagggtggcatcccaatgttgatgttatatgaggacataaggagggcattccactagcgataatatgcggacataagggtggcatttcaccgttgttatgtgtgttaggatattgtctgggataagcaataagggaggctattatacggtgcgataagggaggctattatatgagtgataagggtagcttaagagagataaatgtgtctatatgagcgataaagatggatattgatattgtctgggtggagtgatacatgtggctataggggagataagggtggcaatatcaggaatgatatatgatgatgtggggttatggcgttggtgatttttatgtgatgatgtggcattattgtgttggtgtttctgtatgatgttgtcattctccttgtgtttgttatacactttgtataacttgatttgtgttttcagttagctaattgacatccttgatatttcttattaatctgggctgcaataatatacttgcacatgcatacaccatagcatgccacttatactagcttacgagtacataacctgaaaattatctgattcgtgttgatattgtgggcacgaggtactgtgggtatataataattatgttattgacatgtgaactgtccatgcagatgtgatatgaaatgtgggcacgaggtgtcgaggtatataattattatgatattgtcacgtgaattgtccgtgcaattgtgatatgagatgtgaccacgaagtgccgtgagtaaatgatgatttttattattggtatgtaagattgtaagtaatcagtgcagttcttatatattgatattttgggcatgtgaattgtctgtgcggttgtgatagagatataggcatgaggtgacgtgaaaatatgaaaatgggttgagaactgtattttatgactataagatgaggtatcacatagtgattttgttgtggaaaaacttgtatttgaaagacttgtttaattggatgtacttgtattccttatttggtgaccaataactatggtattcttattgccttagtgttgatataactggttgattcttgttgccgttactactatttgtttctcatcattatcgtagactgctatattacacaggttatttgactggtgagtatcttgattgtacctcgtcgctactccaccaaggttagtcatgatacttactgggtaccgactgtggtgtactcatactatatttttgcacattattttttgcagagccgggtattggagatatcgggcgtaggctgagttagtgcattgatcacaaggattcaaggtagagttgcttggtcgtcacggcccttggagtcttttcattttattgtattgtcaatcattattcgaacaatattatatatttaatccttgagatcatttcatgtattcagttagaattcgtgactcagtattaccagtcttgggaggtatttataactgttctcacttttggtttcgacacttgtattttattttttttaaatgtcttgaattgaaattggaatcgtcttacctagtcttagagactaagttccatcacgatgcctgtagtgggattttgggtcgtgatagattcatccgtcccgatctctttgcccatgttctaaaaaaattactaataagtatcaaaaaatatttgctagttaatttatctaataaatttaagttacatttattttacatatctaccactataatttggcattttatagcaaataatttattcatttcacatgttatgaatagaaatgttgattatgtaatgttaactgcaattaaaaagttatcattcaatttaatatttttaccgttaacggtgtacttcgtttgacaaaaaaaaaatcaagataaaggaaaaaggaaatgttcgtacaactactattttttttattgttataaatatattacattatggttgttcatttaatactcagttgtaaataagttttttgaagaattttatccatacgagactccgccgtaaatatgtttatctattttgtactctattggaaatatgcctcatgaagaagcttattattttggtactccgttatggaaatatattacccctagaacaagattatatatgtctggtacaataacagcttacacagcatcttgcaatagcagctgccacaacaacttacaagcagcttgcagtagcaccttacacaacaacttcttttctcttataaatagaggagatttcagttcattatgtacatcagtttgaagttgaataatatatcaatttctctctatacttgtctttacttaacaatctttattttataacatgttatcagcatgagactctgccatctcgagcaaatactttgaaagtatcagaagtacgaactttctttttctaaataacgtcaaatccttataaactttaatttgtagccctagatatatcgggcaaaagctacatgtcttgggtgtttgatgctgaaattcatcttgaggcgataagtatggtagacaccatcaaggacaaaaataaagcatcaaaccaaaagtgtgccaaagcaatgatattccttgtcatgacccaaaatccattaatggccgtgatggcgcctaacaccattatcaggcaagacaacaataattgattaactagattatttattttagtattttgaaatcataattttccttcaatcaaataatcaaaaataaaatttaaagagtaattgataatattttcccaactacaatactaaacaactcataagtacccccaaaacccggtgtcacgagtgcatgagtgtcacgacccgatttaccctccgaaagggatcgtgacggcacttagtctcgacaactaggtaagcctaaatttgtggaaaaataaatatataataaaataaggcagaaaggagaacacaagtagacataatgtagccgctcggcatgtacaaatatagctttccaaaacccggaatgtcacgttcagtcacaagctttgtactaaatagctatatacaacgaagagtagaaaatacataagatgtctctgtctaaactataatataaggtgactcataggattttgtggacgcggcagaattaccttgaggtctcctcgaggctgctacaaggactcctagccacggaactgagtactggtacctggatctgcacacgaaaatatgtgcagaaaagggcatgagtacaccacaatcggtactcagtaagtgccaagcatgaccccagtcaagtagtgacgaggccaggttaaggctctactggatttttgtaagtaaaacagttttaaaatagtatagaaggatataaattctaaagtacacagtaaaatgaatagtctgaaaataaaacagcaacagggagcccttggctcagcacaacgtatcacacagtgaaatctcccgggaaacgtcccgtagttccaaatgtaaagatgcagtacagaggaaaagctctcggaatacgtccgagtcgcaatttaaatatgcagtacatggggaaagaccggaatacgtctgtagtcctaatttaaatatgcaatgcgaatgaatgtcggataaggtgtatttaaacagttcaggaacaagtcacagacaagaaccagataaagactaactaacatggtgcacactgtatcaaatagggaatctaggtaaaacaggtaggcatgcttcttcctaatctaagccacacaagtagcacattaaacggtgaaataagaataaaatgaattatggcatggataggaaaaatagaattttagcaacaatggaccgtgtatgtactcatcacctcatgtacacggaacccatacaacaaatagtatcaaaacaacataagggaaagtccttaacacatagttaggcaagccacttacctcgactgctctactaaactcaaaatcacgctcttgccacgagtatccgactccgaatgacccaaatctattcaattcaattgcataatgtaatgtcactttaagaaatcaatctagttaattagttcgaagctaatacgcgaaattaggaaaatttcccaaaatgtcccccgggcccacatctcagaatcgggtaaaaattatatattccgaacacccattcactcacgagtctaaccatacaaggattactcgaatcggatatcaaaatcccgatcaaaaccaaaaaaaataggctaagaactttatccattttttcccaattttccgccataatttcgaaattaaaggatggatttaagagcataatcatggaaattagtctaagccgagtaggaattacttacccaagttgcccaggtgaaaatctctccaaaatccacactttcccgagctcccaagttcaaaatatgaattatggctcaaaccctcgattttgggtttctaagattctgcccagcactttctccactgcgatcgcggacccacagtcgcgatcgcgaagaacaactcacacgcgcccctcagttaacactacgcaaacacaagaatgcgttcgcgatcgcggttctcaattatctcaaccctacgcgatcgcggctggattcacgcgaccgcatagaggaacactcaaaaactctgccgcctaatctattctatgcgaacgcgacacagatcatgcaaaagaagtggccaaggctgcccattctacgcgatcgcattacatttcttgcgatcgcgattcacaaaaatctgcctggcctcaattactctacgcgatcttggactccctcatgcgatcgcgaagaaggaagaactgttgcacttacaccagaaaaaccagcaatcacacaaggttaaaaatgcccgtttgagtatccgaacatacccgaggcccccgggacctcaactaaacctaccaaccagtcgtaatacctcattcaaacttagtcaagccttcaaaacacatcacataacatcaaaatcaccaattatgcatggatttaatcctaagaacttatgaaagttccaaaatccacaatcgatgccgaaatatgtcaaaactattccgaatgacctaaaattttacacacaagtcataaataacacaacggacctacaacaactctcgaaattccatttcgagcccgatatcaaaatttccctatcggccgaaatcgccaaaatcctaactttcgccaattcaagccttaatcttttacatacctcaaaaatacattccagatacgctcctagtcccgaaatcacctaacgcagctgacggagttgacggaattccattccagatccgtcttcacatagttccaactacaatccaatttcttaagcttaaactcacatatagggactatgtgtccaaaaactctctgaaattcacaactaaacgttccgacaagccccaaaagcataaatagacatggggaaaatagttattaggggatcggggtgctaactctcaaaacgactgactgggtcgttacattctccccctcttaagaaaatcgttcgtcctcgaacaagtatagagacatacttgaagttgtgaaaagatgagggtactgaatgcacatatctttctcggtctcccaagtcgcctcctcgaccggctgacctctccactaaacctttactgatgcaatattctttgacttgagttttctgacatgtctatccaatatagctactggctcctcaacatatgataaatccttgtccaactggactgaattgaaatccaaaacatgagtcgggtcaccgtgatacttccggagcatggagacgtggaataccggatgaactcctgataggctagaaggcaaggagagctcataagcaacctccccaacacaccgcaacacctcgaaagggccaatgaataacggactcagcttacccttcttcccaaacctcatgatgccctccataggcgatacccgaagcaaaacccggtcaccagccatgaatgtcagatcatggaccttccggttcgcataactcttctgcctagactaagttgtgtgaagtctctcctgaatcaccttcaccttatccagggcatcctggaccaaatatgtacccaacaatcgggcctcacccggctcaaaccatcctattggagaactgcattgtctaccatacaaagcctcgtatggtgccatctgaatgctggactggtaactattattataagcaaactctgtaagtggcaagtattggtcccataactctccaaaatccatcacacatgcacggagtatatcctcaagaatctgaatcatgcgctaggactgcccgtccgtttgagggtgaaaggttgtactcaactctaccatggtgcctagctcctgcttaatgtctctccagaaccgtgaagtgaactgtgtacctctgtctgaaatgatagatactggaataccgtgaaggcgaacaatctccctgatataaatctccgccaacctctcgaaggaataggtagtcaccactggaatgaaatgggctgatttggtcagccgatccacaatcacccaaatagcatcgaactttctcaaagtccgaggaagtctaaccacaaagtccatggtgatccgctcccacttccactctggaagctcaatttgctgaagtaaccttcctggtctctgatgttcacatttgacttgctgacatttgagacatttgtccacaaactccactatatcatttttcatccttctccaccaatagtgttgtctcatatcctggttcgcggtacccagatgaatggaataatagcgagctgtgggcctcctcaagaatcaaatcccgaatcccatccacattgggcacacatattcgaccctgcatccttatcacaccgtcatctcctatagtcacatccctggcatcacctcgccgaaccctgtcctaaagaaccagaaggttgggatcatcatactggcgctctctaatatggtcataaagagaagatcgagaaaccacacaagctaacacccggcaaggctctgaaagattcaatctcacgaactgactggctaaggactaaacatcccagcctaagggcctctcaactgccggaagatatgccgaattccccaaactctccgcccggtgactaaaggcgtcggccaccacattggccttccccgggtggtatagtatagtgatgtcataatccttgagtaactccaaccacctacgatggcgcaaattgaggttcttctacttgaacaagtgctgcaaactccagtgatccgtgaaaatatcacagggaacaccgtataaataatgacgccatatcttcagggcgtgaacaatcgcttccaactcaagatcatgaattggatagttcttctcatgcaccttcaactgtctgtacgtgtaggcaatcaccctaccgtcattcatcaacaccgctccaaggccaatcctaggggtgtgcattcgatttatcgattcgattttgacccttatcgataattacttatcgattatcgatttgtacatatgcttatcgttattgtttctataagattttgattttttctatttatcgatttttggggcttatcgattcagttatcgattacaccaataagaaaatttgcgagattccacagaaagtatatcgctataaacacgcctaactaatatggacaaaaagaaactaaaataaggtgaacaccatttataacataaaaattgtgtcaacaagcacatgcaacgcgaaatattcaaatcaaattggtgattctcacatattttcagtaatcttgtgttggagctccataaggtccatctattaatagctttggcaaaatgagatttaggagtaacttttttcatcaatagtaataaaaccacccaaaatattcatatatttacctgaaagcgtttctttcttaaatatacccgattttttttttgtagtagtagtagtttgagtccatatagaaatataccttttcttggtgttttcgtcagctctaagcaggacactctttccaacctctgggcgctcgcaagccttagaaaagacccgcttgagttcttgagtccaatcaccaagttgccggatgtgaatgctcaagtagtcatccccaggagctgaagtaacggaaaatggatgcatgtatattcaacacgtagagtttcatcagataagcatagtgaggaaactaattttcataaatagacaagagaaaaaactcacggcctaagaatgggtagaggaaataatagggttagggatttagggtaaaggaaaggttattatagaataagggtatatttgtctttttagtatatcttatcggtttatcgataaatcaataatcgaagaggacaaaatcgaaatcgaaatcgataagaaaaatttcgaaattgataaaccgataacaaataatcgattcgatttatcgataaactgattcgaatgcacacccctagccaatcctcgaagcatcacaatagattgtataggaccctgaacctgtgggcaacaccaacactggagctgtagtcagggctgtattgagcttctgaaagatctcttcacactccttagtccacctggacggagcacccttctgggtcagtctggtcataggtgatgcaatagatgaaaatccctctacgaaacgacgatagtacccagccaaaccgaggaaactgcggatcttggtagctgaagacggtctaggccaactctgcaccgcctccaccttattcgtatctaccttgatcccatcacaagacaccacatggcctaagaatgccacacaatcgagccaaaattcacacgtagaaaattttgcatataatttcttctccctcaaagtctgaagcacgatcctcaaatgttgctcatgatcttcctgggatcgagaatataccaagatgtcgtcaataaacacaacgacgagggaatcaagataaggccggaacacattgtgcatcaaatgcataaaggctgctggggcattggtcaacccaaatgacatgacaagaaactgatagtggccatatctggtccttaaggcagtcttcgagatatccgactcccgtatcttcaactgatgatagccagaacgcaagtcaatcttggaagataccttggcaccctgtaactagtcaaataaatcatcaatgcgaggcaaaggatacatgttcttcactgtaaccttgttcagctgccggtaatcaatacacatacgcatagaaccatcctttttcttcacaaataataccggagcactcatgtgatacactgggcctaatgaaacccttatcaagaaactcctgcaactgctctttcaactctttcaactcaggaggagccatgcgatgtggaggaatggaaatgggctgagtgcccggcaacaaatcaatgccgaaatcaatatctctgtcgggcggcatcccgaaagatcagttggaaaaacatcaagatagtccctcacaactggaactgactcaactgtaggggtatcaacactaacatctctcacataggctaagtacgcatcatacctcttctcaaccatccgctgacccttaaggaaggaaatgactttgcggggagtatactctaaggtacctctctactcaaatctcggaaaacctggcatggcaagcatcgcggtcttggcgtgacaatcaagaatatcataatggggcgacaaccagtccatgcccaagataacatcaaaatctaccatattgagtaataataaatcagccctggtctcaaaaccactgataacaatcaaacacgattgatatacgcggtccacaacaagagaatctcccacgggagtagacacataaatggggtaactcaaagaatcccgggatatccccagatgtgaagcaaaataagaagacatttatgaacatgtagatcctggatcaaataatactgatggatccctatgacaaacagggacaatacctgtgatgactgaatctgaagcgacggcctctgaatgggctggaatagcatagtacctggcctggcctcccccctctagggcgacctcgacctccccgacctccacctcgagctgtctgagaaggtgtggtagcagctggggctggaaggatagctggaggacccggtggagcacgtggggcctgataagtctaagataatgcacccctcctagctttggggcaatgcctgagcacgtggagagtgtcaccacacccaaaacaacccctcggaggacgtgccggttgatgctgactttgaactggccggtgataacacacgagcaggaggcaccctagatatttgtggtgcataattaggctcctgaggtctaggaggagctggaataccgccggcttatgacttgttcctcctatgaacctagacgctctgataccaacttgtcacgacccgatttaccctcctaaaggaattgtgacggcacctagtctcgacgactaggtaagcctaaatttgcgaaaaaataatatataataaaataagacagaaaggagaacacaagtagacataatgtagtcgctcgacatctacaaatataacttcccaaaaccaggaatgtcacgttcagtcacaagctttgtactaaatatctctatacaacgaagaatggaaaatacataagatgtctctgtaggtgactcgtaggattctgcgaacgtggcagaattaccttgcggtctcctcgaggctgctacaaggattccaagccacggaactgagtattggtacttggatatgcacaagaaaatatgtgcagaaaagggcatgagtacaccacaattggtacccagtatgtgccaagcctaacctcagtcaagtaatgatgaggtcaggttaaggctctactggatttttgtaagtaaacagtttaaaaatagtacagaaggatataaattataaagtacacagtaaaatgaatagtccgaaaataaaacagcaacagggagcccttggctcagcacaacgtatcatacagtggaatctcccgggatacgtcccgtagttccaaatgtaaagatccagtacatggggaaagctcccagaatacgtccgtagtcccaatttaaatatgcattacaggggggaagctcctggaatacgtccgtaggcccaatttaaatatgcaataagaatgaatgccggataaagtgtatttaaacaattcaagaacaagtcacagacaagaaccatataaagactaactaacatggtgcacattgtatcaaatagggaatttaggtaaaacatgtaggcattcttcttcctaatctaaaccacacaagtaacacattaaatagtgaaataggagtaaaatgaattatggcatggataggaaaaatggaattttagcaagaatggcccgtgtatgtactcgccacctcaagtacacggcgcccatacaacaaatagtatcaaaacaacctaaggggaagtccccaacacatagttaggcaaggcacttacctcgacttctctactcaactcaaaaccacgctcttgccacgagtatccgactctgaatggcccaaatctattctattcaattgcataatgtaaatgccattttaagaaatcaatctagctaaatagttcgaagctaatacgcgaaattaggaaaattgcccaaaaagtcccccggaccaacgtctcggaattgggtaaaaattataaattctgaacacccattcactcacgagtctaaccatacaaggattactcaaatcagatattaaaatcccgatcaaaactcaaaaatttgtcctaagaactttatccaatttcccccaattttccaccataatttcgaaactaaaggatagatttaagagcataatcgtggaaattagtctaagccaagtaggaattacttacccaagtttcccaggtgaaaatcactccaaaaatcgcactttcccgagctcccaagttcaaaatatgaattatggctcaaaccctcaattttgggtttctaagattctgcccaacactttctccactgcgatcgcggacacacagtcacaatcgcgaagaacaactcacacgcgcccctcagataacactacgcgaacgcaagaatgcattcgcgatcgccgttctcaattacctcaaccctacgcgatcgcggttggcttcacgcgaccgcatagaggaacactcaaaaactctgccgcctaatctattctatgcgaacacgacacagctcctgcgaacgcagtggccaaggctgcccattctacgcgatcggattccatttcttaggatcgtgattcacaaaaatcttcctggcctcaattactctacgcgatcgcgaactccctcacgcgatcgtgaagaaggaagaactgttgcacttacaccagaaaaaccagcaatcacaccaggctaaaaatgcccgtttgagcatccgaacatacccgaggccccctagacttcaaccaaacttaccaaccagtcctaatacctcattcaaacttagttgagccttcaaaacacatcacataacattataatcaccaattatgcatggattcgagcctaagaacttatgaaatttccaaaatccacaatcgatgccgaaacacgtcaaaactattctaaatgacctcaaattttacaaaaatgtcataaatgacacaacggacctactacaactcttggaattccattccgagcccattatcaaaatttcacctatcagttgtaatcgctaaaatcctaactttcgccaattcaagcctaaatcttttacagacctcgaaacacattccggacacgctcctaaccccgaaatcacctaacggagctaacggagtctacggaatttcattccggatccgtcttcacacagttccaactacaatccggtttctaaagcttaaactcacatatagggactatgtatccaaaaactcttcaaaattcacaactaaacgttccgacaagtcccaaaagcagaaataaacatggggaaaacagttattagggggtcggggcgctaactctcaaaatgaccgaccgagtcgttacaatgagcatcaactaggaagtaaacaaaatacaacatctgtccgcaatacaaattagacagaaaaaatacagatgactccaagggagactctgctggctacggatcgtaacctgaaatgtagctcacgacgaatccctgcatcattcgtgccttcgtgcccaaaagaccactggtcataaaagtacatgcacaaaaatatgcagcaagtgtagtatgagtacataaatccacgtgtacccagtaagtatctagcctaaccttggagtagtagtgaagaggggtcaacattggcactcacaagtggtccaataatatcatgtacaacaaggaggtgaacaaatatgaggtagattaataaatgaaatatacaagtgtaaatatgtggtacaattatcttccttacaataaactcaagctcttaattagcaaatttctcctcaaccagagcatgcacgcacacacgcgcacacacatacacacacacaattggttgttataatacgaatcagggaaagactcgcagatactctagcttcttgccaaatattacgcacgattccatgaggatattttttataaaaatgtcgaggcgtacgggccaatccaacataaatattaaaatgcgcactgccgagggtcgaacgggacgaccatagatgcatctattaaactgacaaggcgaaccacccgatcccattagaataagaagtttaaacgggtccttgatcccccattcacgaatgaacatgtgagttataatttttaaggaaaattattcgatgacaacgcataaagcgcgagaaaatctgtaagaggaacaccattcttccgtggcaaatcataaaactcgcgaaaactctacaatagcaagtccatcactttacgcatgtacagtctcaagtcataatgcaaaataaaaaatttaaacgagcaaggataatccctatagtacaagtacaacatgatgtaaacctaagtctacccggacaataacatgaatctaactacgtacagattctcgtaacctcgtgcatacatagtccctgcaacaagttacacacatcaaatacatcacctatgggcagtttccccctcacacagttagacatgagacttacctcgtctcaaagcttacatatatgcatgtctgtgtttgacctcattctagagagaatgagtggcaaggcatattgcattcggatttctggcatggttgagcaatagaaatctggatattggcatgaatatttccggaatattgatccatgtattttaataagtgtttttatactttgaaatgattagttttattaactagaggatctagtacataaaatgtttggcaatgagctgcaccctcagacctaatgatacattaagccgactgaagtttgtttctgcactactgctgattggtgcggctatcagcaatttgtgccaccctagggctggtccatatgacggagaagtgagtttaatggtcattttgatccttttgcgcgtctgaactatcgatagcttacagcatagtagtgcatgttaacttgttatcttttgctcgaatatgacaacccactgattttgagtcaagtcagttttaatgcatcttcataaaattcttttgccccctgagagccataagctataaactatatactccctatgtcccaatttttgtgacactcgttcccttttagtccatcccaaaaagaatgtcacctttctatttttagaaacaatttaactacaaaatttgcattttacccttaatgagatgatttatggccacacggatgtagaaaacttattctagaccacaaatttcaaaagtcttcctttctttcttaaactccgtgccaaatcaaacggtgcctcataaattagagtggagggagtatttctgttggaatgcagcatatttaagactttttttttggagaagtttaagactttttttttgttcggtaaaagcatatttaagaaaatgttctccttatagctgcttaaactttattatttggctgttctttttggaaatgaggctataggacttgaaaatggaacaattgcttttaattacttaaactcattttgactaccatcgtgagtgctcagttggtcctttttaactgctttacatttatcttttccagggatctgacattgcacagggtactatcgtaatgaaatctggggagcgattaggtgctgcggaaattggtctacttgccacagtaggtgttgtcacagtgaaggtatttgttttatttccttgcagtttcgatgctataacccataatggctgcctatttctgatgtcgcatttcagattgctgatattcaggtttaccctagtccaaaagttgccgtcttatcaacaggggatgagcttgtagaatcaacagttgggagattagaccgtggtcaggttgtggaagctactatgacgttcctttttaaaaaaaattatctgatgctcacagtggcgatgcagttgccatgataataacacttcttgtctgcattagtttgtgacttcaaaaagaacaacaacccagtataatcccacaagtggggtctggggagggtagtgtgtacgcagaccttacccctaccctagggtagagaggctgtttccaatagaccctcggcatccttccctccaagaactccccatcttgctcttggggtgactcgaactcacaacctcttggttggaagtggagggtgcttaccattagagcaaacccaccttgtggaagcatcttaataaatatctaaagcatctcatctatattctggaatgttgagcatagatatgtaaattgtttgcattcacgcagcgaaatcccattagtttcacctcaacgtcgctcttcttatgctgactaaacttgtggtgcatatatatagctttacttctacttatcctaaaaccattaatctctagaatccttctccaatgtacaagcttttggttgatgccctcgctggttaccttaattagcactgttaagtccgatattaattgaaggaatgtgttttgttctccttatgtggtattggacaatacacccttcaagagctaggttttgagattcagttaggcccaatgtctatttcttcacatagtatcgtagccagacccaagctatccctgttgttgggtttctcaatgttaggctccatgttatgttattgatgctccaattgtccagtcttgggcgtgcggtgggtttaagtcccacattgatggagagtgggtttgtggtctcctaatatgtcttgggcaatcctctcatgtagagttagactaaagatacatttcttcacaagcacaaaatcgtcagcaagtagcatacaccataggacctcttcttgcattatattacatttgttgataatatcaacaaatatttcaaccaatttgaattttatattattcttagaaaacctttatcttttggacctgttctcttacaatcagcaaaaccattttgagacttcgttaactaaatattgaggaatatcaattatagaacatccacttgtgcatccataacctaatgatacttgtcagattgggtgttattctttcgctagcttgcagctcttctttcatggaaattcttcaataaatttcctttttctattacgtatattgatgagatttcgtcaactaaatatgaggaatctgtcttccttcctttctatcttgttatgctcaggtatcttatacataattccctcctgctcattgcatggttactatagtacttgtaatctatgttgtgtggactctccaaaaatgctgccgcaccgtgtcggatcctccaaaaatgcactacttttggaggatccgacatgcacatggcgacatttttgcagagtccgataaacatagcttgtaattggcctatattatttgcaaagatattcgcctctggcgtattttacttaatttctatttgtcacaagcagattagggactccaaccgtgcaatgatcctaactgctgcaacacagcagcaatgcaaagttctcgatctcggtatagctcgtgacgatgagcaggagattgagacgacactagacaatgcatttgcttctggaattgatatccttgtctgctctggaggtgtttccatgggagaccgggattttgtgaagcctttacttcaaaagaaagggagaatattatttcagaaggtaatgccggcaatttctgtttacagattttggaaacttgtattttcaaagggtaatgctcactgcggatgcttatgggattgagctgggagcttgtgctatacaatagtgtttcttgcttgtatctacacatgtcttactttagggcttttttcacttttggctggtgccccaatataattacgatccgacaagtcccaaaagcagaaataaacatggggaaaacagttattagggggtcggggcgctaactctcaaaatgaccgaccgagtcgttacaatgagcatcaactaggaagtaaacaaaatacaacatctgtccgcaatacaaattagacagaaaaaatacagatgactccaggggagactctgctggctacggatcgtaacctgaaatgtagctcacgacgaatccctgcatcatccgtgccttcgtgcccaaaagaccactgggcataaaagtacatgcacaaaaatatgcagcaagtgtagtatgagtacataaatccacgtgtacccagtaagtatctagcctaaccttggagtagtagtgaagaggggccaacattggcactcacaagtggtgcaataatatcatgtacaacaaggaggtgaacaaatatgaggcagattaataaatgaaatatacaagtgtaaatatgtggtacaattatcctccttacaataaactcaagttcttaattagcaaatttctcctcaaccagagcatgcacgcgcacacgcacacacacatacacacacacaattggttattataatacgaatcagggaaagactcgcagatactctggcttcttgccaaatattacgcacgattccatgaggatattttttataaaaatgtcgaggcgtacgggccaatccaacataaatattaaaatgcgcactgccgagggtcgaacgggacgaccatagatgcatctattaaactgacaaggcgaacgacccgatcccattagaataagaagtttaaacgggtccttgatcccccattcacgaatgaacatgtgagttataatttttaaggaaaattattcgatgacaacgcgagaaaatctgtaagaggaacaccattcttccgtggcaaatcataaaactcgcgaaaactctacaatagcaagtccatcactttacgcatgtccagtctcaattcataatgcaaaataaaaaatttaaacgagcaaggataatccctatagtacaagtacaacatgatgtaaacctaagtctacccggacaataacatgaatctaactacgtacagattctcgtaacctcgtgcatacatagtccctgcaacaagttacacacatcaaatacatcacctatgggcagtttccccctcacacagttagacatgagacttacctcgtctcaaagcttacatatatgcatgtctgtgtttgacctcattctagagagaatgagtggcaaggcatattgcattcggatttctggcatggttgagcaatagaaatctggatattggcatgaatatttccggaatattgatccatgtattttaataagtgtttttatattttgaaatgattagttttattaactagaggatctagtacataaaatgtttggcaatgagctgcaccctcagacctaatgatacattaagctcactgaagtttgtttctgcactactgctgattggtgcggctatcagcaatttgtgccaccctagggctggtccatatgacggagaagtgagtttaatggtcattttgatccttttgcgcgtctgaactatcgatagcttacagcatagtagtgcatgttaacttgttatcttttgctcgaatatgacaacccactgattttgagtcaagtcagttttaatgcatcttcataaaattcttttgccccctgagagccataagctataaactatatactccctatgtcccaatttttgtgacactcgttcccttttagtccatcccaaaaagaatgtcacctttctatttttagaaacaatttaactacaaaatttgcattttacccttaatgagatgatttatggccacacggatgtagaaaacttattctagaccacaaatttcaaaagtcttcctttctttcttaaactccgtgccaaatcaaacggtgcctcataaattagagtggagggagtatttctgttggaatgctgcatatttaagactttttttttggagaagtttaagactttttttttgttcggtaaaagcatatttaagaaaatgttctccttatagctgcttaaactttattatttggctgttctttttggaaaggaggctataggacttgaaaatggaacaattgcttttaattacttaaactcattttgactaccatcgtgagtgctcagttggtcctttttaactgctttacatttatcttttccagggatctgacattgcacagggtactatcgtaatgaaatctggggagcgattaggtgctgcggaaattggtctacttgccacagtaggtgttgtcacagtgaaggtatttgttttatttccttgcagtttcgatgctataacccataatggctgcctatttctgatgtcgcatttcggattgctgatatacaggtttaccctagtccaaaagttgccgtcttatcaacaggggatgagcttgtagaaccaacagttgggagattagaccgtggtcaggttgtggaagctactatgacgttcctttttaaaaaaaattatctgatgctcacagtggcgatgcagttgccatgataataacacttcttgtctgcattagtttgtgacttcaaaaagaacaacaacaacccagtataatcccacaagtggggtcttgggagggtagtgtgtacgcagaccttaccctagggtagagaggctgtttccaatagaccctcggcatccttccctccaagaactccccctcttgctcttggggtgactcgaactcacaacctcttggttggaagtggagggtgcttaccattagagcaaacccaccttgtggaagcatcttaataaatatctaaagcatctcatctatattctggaatattgagcatagatatgtaaattgtttgcattcacgcagcgaaatcccattagtttcacctcaacgtcgctcttcttatgctgactaaacttgtggtgcatatatatagctttacttctacttatcctaaaaccattaatatctagaatccttctccaatgtacaagattttggttgatgccctcgctggttaccttaattagcactgttaagtccgatattaagtgaaggaatgtgttttgttctccttatgtaattaggcccaatgtctatttcttcacatagtatcgtagccagacccaagctatccctgttgttgggtttctcaatgttaggctccgtgttatgttattgatgctccaattgtccagtcttgggcgtgcggtgggtttaagtcccacattgattgagagtaggtttgtggtctcctaatatgtcttgggcaatcctctcctgtagagttagactaaagatacatttcttcacaagcacaaaatcgtcagcaagtagcatacaccataggacctcttcttgcattatattacatttgttgataatatcaacaaatatttcaaccaatttgaattttatattattcttagaaaacctttatcttttggacctgttctcttacaatcagcaaaaccattttgagacttcgttaactaaatattgaggaatatcaattatagaacatccacttgtgcatccataacctaatgatacttgtcagattgggtgttattctttcgctagcttgcagctcttctttcatggaaattcttcaataaatttcctttttctataacgtatattgatgagatttcgtcaactaaatatgaggaatctgtcttccttcctttctatcttgttatgctcaggtatcttatacataattccctcctgctcattgcatggttactatagtacttgtaatctatgttgtgtggactctccaaaaatgatgccgcaccgtgtcggatcctccaaaaatgcactacttttggaggatccgacatgcacctggcgacatttttgcagagtccgataaacatagcttgtaattggcctatattatttgcaaagatattcgcctctggcgtattttacttaatttctatttgtcacaagcagattagggactccaaccgtgcaatgatcttaactgctgcaacacagcagcaatgcaaagttctcgatctcggtatagctcgtgacgatgagcaggagattgagacgacactaaacaatgcatttgcttctggaattgacatccttgtctgctctggaggtgtttccatgggagaccgggattttgtgaagcctttacttcaaaagaaagggagaatattatttcagaaggtaatgccggcaattcctgtttacagattttggaaacttgtattttcaaagggtaatgctcactgcggatgcttatgggattgagctgggagcttgtgctatacaatagtgtttcttgcttgtatctacacatgtcttactttagggcttttttcacttttggctggtgccccaatataattacgttccgacaagtcccaaaagcagaaataaacatggggaaaacagttattagggggtcggggcgctaactctcaaaatgaccgaccgagtcgttacaatgagcatcaactaggaagtaaacaaaatacaacatctgtccgcaatacaaattagacagaaaaaatacagatgactccaggggagactctgctggctacggatcataacctgaaatgtagctcacgacgaatccctgcatcatccgtgccttcgtgcccaaaagaccactgggcataaaagtacatgcacaaaaatatgcagcaagtgtagtatgagtacataaatccacgtgtacccagtaagtatctagcctaaccttggagtagtagtgaagaggggcgaacattggcactcacaagtggtccaataatatcatgtacaacaaggaggtgaacaaatatgaggtagattaataaatgaaatatacaagtgtaaatatgtggtacaattatcctccttacaataaactcaagctcttaattagcaaatttctcctcaaccagagcatgcacgcgcacacgcgcacacacatacacacacacaattggttgttataatacgaatcagggaaagactcgcagatactctagcttcttgccaaatattacgcacgattccatgaggatattttttataaaaatgtcgaggcgtacgggccaatccaacataaatattaaaatgcgcactgccgagggtcgaatgggacgaccatagatgcatctattaaactgacaaggcgaacgacccgatcccattagaataagaagtttaaacgggtccttgatcccccattcacgaatgaatatgtgagttataatttttaaggaaaattattcgatgacaacgcgagaaaatctgtaagaggaacaccattcttccgtggcaaatcataaaactcgcgaaaactctacaatagcaagtccatcactttacgcatgtccagtctaaagtcataatgcaaaataaaaaatttaaacgagcaaggataatccatatagtacaagtacaacatgatgtaaacctaagtctacccggacaataacatgaatctaactacgtacagattctcgtaacctcgtgcatacatagtccctgcaacaagttacacacatcaaatacatcacctatgggcagtttccccctcacacagttagacatgagacttacctcgtctcaaagcttactttccggtccaaagttgtgctttaaatcctcaactcgatgtcaaacgacccgaagctagtcaaatgttatataaaatagtcaatacatgctcaagagttcacatcctaaaaatcacccccaccccctatcgagcccacgtgcccggattccggaaatatttgaagatagacattacccataacatcctgaactcaaatatataatttattctcaatttcatgcccaaaatccaatactataaatttctaggtttttcttcaaaatcctaaatttctacaaattctcatgcctaaatccatgcatagaccttgtatgtaactcacaactagtacaaatcacttacctcatgcttgatgatgaaatccccttttcaaaagctccaaaaatcgcccaagccgtgtgaaaaatgggtgaaatgaacccaaaccccgctttaaaacattctgcccagcctaggtccacccttcttcgcgttcgtgatcaaagcctcgtgttcccgtaggattcagactcaactgctttgcgttcgcgaaggccaaactactctaggccctcgctccctctttcttcttcgcgttcgcgacccagtgtcgcattcgtgaaggcttgcccagctcctgcctcgcattcgcgaaggccaaaacccaacagccttagaattcctcttcgtgaatgcaggactcccttcgcgttcgcgaagaaggaaaccaaacactagcaacatcagcccaaaacaacccgaataaatccaaacgcataccaaaacacacccgaggcccttgggaccctgtccaaccacatcaactagtcccataacataacaccaaattgctggaggcctcaaattacatcaaattacatggaaatcatgaatcacacccaattcgaacttaatgaactttagatattcaaacttctacatttgttgccgaaacctattaaatcacgtcctattgacctcaaaatttgcacacaagtcacattcgacattacagacttaatccaattttcggaatcggaattcgaccccgatatcaaaaagttcacccccggtcaaacttctaaaaaaccttcaaatttctaactttcgccaaatgatcccaaaatgacctacggacctccaaatccacatcggggcgcgctcctaagaccataatcaccatatggagctattcccgggcttggaattccaagcagaaatcaataacattaaaatacacttcaacctaaatttatgaaaattcttccaaaatgccgactttccacaataggcactgaaaatgctcccgggtcatccaaaatccgatgaggatatacacccaagtaagggtggcaggtgggccgggcccgcgggcttagcgagcttgcgggcttcacgggccggcccgtggggggcccgggcttggggggctttaggcccgtggggggccgggtctatgtcttgggcccgtgagcccgggcccgccaagcgggcttgggcctgggccaagcgggcccacggtcatattttaaataataaaaaaaaaattaaaaatggccaacggccatatttgtaaactagccgtttgggaatttaaaaaatagccaaatggcccccaaactttgttttaaccccaaactttttataattactctttttcccttttttcaactataaataccccctcattatttcatttttactcacaaaatcatcaatctctctctaattttcttctattattgcttactttattattgcaaattgtgaaaaattgtgaagttggtgaattgaagtattcaaagtcttcaagtcttcaacattatacaattttcaagaagttgttcgtcaattcggtaaactcgttccaactcttaagttttaatattatagttttgtttgtttaatttattttccttataattaatatggacttttctttgaaatacatgtttggtggtaagggtaagggtaaatctaaaattggtgaatctagtaagcaagctactactactcccccggctccccgacgtagatctattacccgtcctcccccacctattattcttgatagtgataacccttgttttcaatttactgatagtcagtttatacatgatcttacaccagcttcacaattaaatgatgaatatgtgaatactctttatggtaatacaactatcgatgaaaattatgaggaaaatgatgatttagatgaaattcaacccgatttagatgatacacctactagtccttttgttaaccaaactgataataatccaaatgatgccccggttgaccctcctgtagtaactcctacttttaatagagaacgtgctaaacggagcgaaacatctcttgtttggcatttttttactcaattaagagatcaaaataaggctaaatgtaaaacttgtgggaagttgatggctcataaatttaatgaccaccgtggcggtacgggtagtttgagtagacacatactaaaacaccctgaaactaaaattaaatttcaacaaatgaaagctcagcaagaggggactagtgtaggtactcaggttaaccctagtaccgggtcaaatctagttcaaccgggaattaacactgttaccggtggcattttatattacgatccaaataaagatcgtgaagaattggcaaaaatggttattgttatgtgtttaccatatagttttccctctaaccctcactttgtccattatattaaaagaatttttaatcctacttataaaggatggcctcgcacaaccgtaaagtctgatatttataaatataaacatgaatatgaacaatatttgcgctatttatttactcatattagtaatcgcatttctattactactgatattggtaagagtggtaatgactgtgattatttaactgttaccactcactgggttgatgatgaatggataatgcaaaagcgcattattgcttatagaataattacttctagtcacacaggtaagtttattgctaagacagttcatgatatttgtagatatttttgcattcaagataaaataatggtaatttcaatggataatgcttctaataacactaatgttataggctatcttacaactacactaagtcctgcatttagtaatattttccatgttagatgtatttgtcacatttaccatttaattgtcggtgatggtttgaaaactttaaatgctgaaattgcaaaggttaaattcgctcttcattggcttttttattcaaaccgtagaagtagagttagagaatattataaaaaatgtgatgaatttggccttagataaagaaaggttcctaaaccttgccccactaggtggaattacttgtatgaaagtttagttgttgcatatgagtatagaaacccaataatggcaacgtataatgctcgtgttagtgatgatgatgatgatgatggtcaccttacaaatcaagattgggctaatgttaaaattcttctagattttttagaacattttcatgttgctacaaatgacttatctgggcaatattatgctactatttctaattgtttagtttatatttcagcacttgcagaattatttaatcaattttcagagggtggggtagtttaccaatatgctattgatgatatgaaagataagtttaaaaaatattttttccctatcccccctctttatggtattgcagccatgttaaatcctacaatgaaattaggaggtcctcactattggtatactcagatttataatgctttacctctttcacatgaggaatttgctacacttaaagatgaaaaataatcaattaaaataaatgctcaaacaatttataatgcttatcaagtagcattagatcatgctagaccaaatattccaactcctacctcgtctagctcgcaggttcctaaaagagttgcgtggctaaaagcacttagttcttggacggggttcaagggttctcaaggtgataatattggtgattgttcacaactaaatgagcttcaagtttatttgtcgcagggacttgaatcagagaatccagacggcaccttcaatgttttggaatggtggaaagacaaagaaaaacactttccggttctttcaaggatggctcgagatattttaagtattcaagcttcaacagtggcatcggagagcgctttcagccaagcgagacttcaaatcgatgatcatagagcgtctatgagggagagcttagaaaaatcagtactcttcagagattggatccggtcggaaagaagaaattttggacttgctgaatcacaaccggatatagacgaagcttatgaagaaatgctagcggaacttgcggaggatactgcttcgcccggaagcggtgatgaacaagcttcttttccaccaccaccaacggaaattcctcccaaccttgaaggatttatgaaatttgttagagataatatgtagattaatatgtaacttgtattttggcacatcttgattagtttttttcccttttaatggtggtattagtaccttagctgtgctcattccattggggggaggaagactaagaaagatattgtcaattttttaaatgtcgtattaataaaaattataagacatttccttgaatatttgtgtttaaacttacaagacataagtcataattatataatataatttacaataaactgtcttatataatataatataattacataacaaatattttgtaactctagaatcacacttatataatataatttataataagtgcaagtttgaatatctcttcactatttttttgtgtgtttaaacttgaattacaagacataagtcataattatataatataatttacaataaattgccttagataatataatataaattcattaaaaaaattaaatagccaacggctatattttaaaaactagccgtttggcatgtttaaaaaatagccatttgacccccaaactttttataattacactttttccctattttcaactataaataccccctcattctttcatttttactcacaaaatcatcaatctctctcaatctctctctactcaaattcccaattcaagttaaatcatgcccggtggtcctagaattaccccatttgttcgggaatattataatttggtagaagaaaatgaagaaacttacacgatatcgtgcaagcactgtggttttgtcttcattcggcgaaagatggagggcttaggccctttaaagaggcatataaccaagtattgtccagggcgtcctcaagacattcgtatctaatattttaagtttaattcaaacttgtgttattttaattttattagtcgtattatgcttaacgttgtagtttgttaaattaatttgatgtactattaattaattatgcaatgttagtgcaagtttgaagtactattattattaatttgaagaaacttacttgaattacaatacataagtaataattatataatatactttaatttgaagtactattaatttactatgcaatattagtacaagtttgaattactattattattaatttgaagaaacttactattttttgtgtttaaatatgaattacaatatttatatcccaaagatttacaagaaattgccttacataaaaaaaataggtcggacccgtttaggcccgtttggcccgcgggccctggccgcttagcccgggcccatgtgggcttaggcccgtggggggtcggttccacccgcaaagcccgcggccgtttggcccgggcccgacccattagccacccttacacccaagtccaaaatcatcatacgaacctgttaaaaccttcaattaccaattccgaggtcgtttactcaaaatcaaaccttagtcaattcttccaacttaaagcttccgaaatgagatctttctttccaaatcaactccgaacttcccgaaattcaattctgaccacgtgtacaagtcataataccggaagtgaaactacacatggactcaaactgtcgatcgacgcgctagagctcaaagcgaccggtcgagtcgttacattctcccacttaaacatacgttcgtcctcgaacgtgctaagaactactccggagttgtccaaaatcactatttaacaccctgtgcacctacccgtgctaccacaacccagttgagaatattaactcgagcaaacttgaagattctccattttatttggttaagttagccttagagccaaattccaacatctgaaattctctaacatgtctgttcccaacatacaaaaaccgtattagtcactacacactatactaaaacatgattgtatgcccttactgaatccataccatgcaccgtacgattcacatcaccataataacatcccctgactacaataatcaaaattgcacgaatatgatgcccacaacataccttatgacacatataagtcatgttccaactcttgcaatactgccacaatggaaaagatgtgtagaaattcttaaccaactgccgaatggataaatcattgagcccctcctcctgacaaggaccattacctcactatgaaccaaaaaatgatattcgcttttttatatgcctcatataatccgatcgcactgatcccgggtctaataatctcgtctcacccagtttaagttgctaaggcaataatccaccttagacactgtaaaaagtctcatatgatgccacaatatgccaacaagatacaaactcgaatgtgtacataaggaaacgaactctagaaagaactactcaacccacttaactaatttaaacaatcgaaaagatcatcgcattcgcgcatggtgtatcgcaaacacgcaatgctttttgggggtagtctcttttgttctttgcaatcgcgtgaatttacttgcgatcacataaggtcaatttctgtaagtggaaattttgcttcgcgacgggatcgtgtgaatttgtcagcgatcgcattaaggaaatgaccgacacattttccatcttgaacgatttggagctcagggaaaggtgatttttcgggagattttcaaggaaaacatcagggtaagtgttcttaacttatttttggtcaaattatccgaatttattgctatttttaggtttaattggtgttttaagttggaataattgtgaaaaccctttcggttaaattgaggatttgagggtcgagttgatgtcggaatttgataaatttggtatagttggactcgtagctgaatgagtattcatattttgtaacttttgttaggttttgagacgtgggtcccactggcaatttttgagtgaaattttcaattttgttgggaagttaatatttttcatatggaattaattcttatattttgtattgactgaatcgaattaattttgactagattcgaggcgttcagaggctgcttcgcgaggcaagggcatattggaataaagaattataaggtttgagttaagtaacacttctaaacttggtcccgatggtataaatctccgaattacatgttatgtgaattgtagggaggtgacacacatgttaggtgacgggcgtgtgggcgtgcaccataaaattcgtgacttaaataaactccgtggagttgtatacttaaataataatgtcattatccacatatcctccacatgttataggaaattgagcggtgtcccatgttaaagatcatgtttgtgatacgtgccgatattttggggcccacagggtcatgttgttgattaattatttttaaaaattgtaatttttatacttagccacattaatcatttgcatatcatatctcagtatctgttgttattcattgatacatcatatcatcatgtcaggttgattttcatgtcattgagagccagagactagatattttgagtgatattatatgggatcgggctgcacgccgcaacatattttatttatttatacatggatctaactattatagcgcttgggatgaatgagccccttcggagtctgcatccccacaatgagcacaattgattttatattgagggatggatcttccctatacatggatcttgtccgaatcattggggatggatcttcccctgggcatggatcttgcccgaatcatttatattaaggtatagatcttccctggatatggatcttttccgaatcatttatatttggggatggatcttcccctgagctggattggacttatatagtactgagtgactgactggcagttgatgtgtatatataatatatatgagattgatctacactgggttggattggccatatacaattctgagtgatcgagtattttgagagtctgagtacatgaggtttccactgagatgcattacatataacatgtacattggcacgtagatatagagatgtcacattcctcaaatcattcaacattgatccattttacttgtactgagtttaactgtttaatttaaaagtatgcctacatttctgtgctgttatttctatactggaatgtatctgttgagctcgtcactattgcctcttgttcatggtaactttagaatttttaatctgttaatgtatacttcaacgcatttttatttcaccccaactttgtaaattccaatcttagaagctcatgatttatattaccagtccttggggagtgtattatagtcagttaaatattaattaaatctgattgttgttatttggtttacctagcgggtgaggttaggtatcatcacggctagttggattttgggacgtgccaatagtagatgaaatctaaatctgtatgcataactaaggcatatgagaatcaattcggacaacttaactagtagaagaatcaatagaagatttacaaaggggacacgtttaacaattaccaagccacttctcatggcatggagaatgaaatttatggtaacatttaggtataactttaacaatttattgtcttcatcggatcccaaacatattgagcattcacttttcatgtaattcaagatatgttcatgtaacgctacaaacattaaatttacttaaacttgctgattattgttcagagaaaagcttttgcaaacaaatttggcatttaaaatttgaaaggacattttttgaagccttgtataatataattactgccatgacatgttgtctcacctcgagtcatttcaaagttacacgtagtgtttgtatagaaaaaaagtcacgtatatgatttatttgtaagagctgatatgaatgacttaaatgccctcaaactttataaaaaaaaacttcaaacacacaagtcgaaatcacaacttatctaatatataatatactacaaagacatgaatttaatatggtatcataccatattttttttcttattatccatatttgcaacaataacattaaatgacatttacacacttttacaattataaaatatgtattcaatatgtacattttcgacaaataaaatgtgtttaataagttgatctcctaaattagttatttaaataaaattacatgacaagttcaatgggcatctatatattatgcatatccaaatttagttttaggttttatattagcttttgaaaatagacatatgcacatatttttaatttaattgactaaataaaatcacgtgacaagttcaagaggcatctacatattacttatattctaaaattaattgtaggatttattttagcttttgggaataaacatatatctgaaatatgaaataatttttgatgatattttaaataataaataatttatcaaataaccaattatttcaacttcaaacttgaaatatacaatgtgaaatttgaagaaaaagtttgaggaatttttacttttcaaattttgttcccaaaacttcaaactttatttacaatgttattttcaaatacccatttttaacttcaaataaattaattttttaaatattaatctccaacatttacaatactctaataaaaagtaaaaaacttttttttttgtcataaaaactttatttttactagttaaagttaataggtaagtggtaagtatgtaatttgcaaactcttatgtcactttcacattttatctattgatttatttatttcttcattggtccaactattggaaatatattatttatatacccctccattctactactagttcattgactcattggtacaactgaagagccaaaaaagcaaaagaatgggcgaaaatggaggaacccaaatctcaaacaagatgatacctgttgaacaagcacttgacatagttctaagtgtagctcagcgtctgccacctgtaactttgcctatttacgaagctttaggcaaaatcttggctgaggatattactgcccctgaccctcttcctccgtatcctgcttctattaaggtatttttttcgcatttatgtactgttttatcaattgggtattgctaattttttgtatattttctgtacatgttaagggtatagatatgtgtttatttttttttggtgtgtagtaacatgttaatatcgattgactatttttgatgcttagaaactgaatcttggaattatgctaaaaaactcagattaaagtatttcgtttttctcgcatttatgtactgttttgtcaattgggtattgcccctttttggtgtatacatattaaggggtatagatatgtgtgtgtagttagtacatgtcaatgttggttgactatttttggtgcttaaaattgaatatacatacatacatacaagagcggatttaggggcggaaggggttcatccgaacccccttcgctgctaagatcaaccaatgttcgaacgcagagcctttctttctcggtcgtctgtcttaataagtggattccgattcatgcagtcacagctggtctaggagccgaaagagctcaactgacttagttgtagagggcgactgaaaaggaggctcgacccacagggagagcagtgcgcagagagagattgtgaatgaaatctgacgactcattatatataagacacaatctatttttttcctctatatattaagttttgaatcctcttgacacaacccaaaagtgtagcttagtggtcaaggactttgtaaggtcacaagttcaactcccactagctataatcgtttatatatatatatatatagcgtgtgttgtacatgttaatgttgattggcggtttttggtgctgaaaagctgaatcttcaaattatgctatgggttccgtgtgaaagttgttatctttcttggatgagtatatcactgtccctgatcctcttcctccataccctgcttctattaaggtattttttctccacatatatgtactgttttagcaattgggtattgtcctttttgtatgtaagttgtagggttaaggggcatgcccattataccctagtttccgtggatacagttagtcttaaaggttggccccaaatggatttctcgatcataatatacatacatacatatatatatatatatatatatatatacacacacacacacacacatatatgtatgtatatgtatatatgttgtatgttaatgttgattgactatttttggtgcgtaaaatattggagttctgcaatgggctctctctgaaagttgttgtctttcttcagtcgatgccttctttgcggccccctattccgaggttggggtgtctttctgtatgtgtgtgtgtgtgggggggggggggggtgtggttggttgttaggcagtgaaggaagaaaattggtccctgtaagggcaacctgatggttaataggcccctgtttgaatgacggtatcacgagctccaatctgggggattttcggccaccgctgtccacatggacatgaaaagtttgagataagacaggatacgaggtagaaactgtagaaggtcggaagatgatatcaaaatgggagatggcgaaaggacaaatagatgactcggagtgcttataaaattacttaagttgggaagaagaagtatagctcaaaacagaagcatatcgataaaaagtttcatatctattgttgtctctttcaagggtatggttaactttcttttcgggtggacctgttgcaggacgggtatgccgttgttgccgctgatggacctggtgaatatcctgtaattgctgaatcaagagcaggaaatgatggagttggtgtgacgattatccctggaactgttgcatatgtaactactggaggtctgtttgttcagatattgtggttccattgatattgttaaaatctttacctttattcctagacgatatattatctcttgttgatcctggtagatatttagaattatatctaaaaacaagaaaagaagatatccttataggaaaaaattgatgggttccatctatccgtatcagatgttgtgctggtggtagacgctggtgcgatcacttgttagatgtcgtgttcaaactaaacttcaattttattgaatctctaaggatcaagttaaggtaggtcaaattggtcttagggttttctagaaaagctctactctaattagtcatgaaaatttgaagtcaggcgctgctttgagctttagggtgtgagaataatacaatgatgagctataacaacaacaacaaaacaaacccagtgtaatcccacaaattaaggtctggagagggtagtgtgtacactgaccttacccctaccttgtcaaggtagaaagtctgtttccgatagaccctcagctcaaagagagatgaaaaagaagctaaaagaataaaacaataacaataggagaagataaataaaataacagaggcgaaagacgtaacatacaataaaagaaatctgtggataagaaaacactaaaaaatgagactaataccaaaactaccagcacgaaaggaagacacccactacgacctcctaaccttctaccctaattcttgaccttcacagtcatgtcctaaaaagctgaagatgcgccatgtcctaccttatcacttctccccaatgcttcttagacctacctctacctctcatcaaccccgctatgacgcacctcctcaccgaggcatctatgcatctcctcttcacatgcccgcaccatctcaatctcacttctcgcatcttatcctccacgggggctactcccatcttgtcccgaatatctttatttctaatcttatctcttctggtatgctcacacatccatctcaacaccttcatttttgctactttcattttgtggacatgagagttcttgacaggccaacactctgccccaacatagccggtctaactactactctatagaacttaccttttaagtcttggtggcacattcttatgaacaaaaccccaaaagcgagctccatttcatccacctcgctccagttcgatgtgtgacattctcgtcaatctccccattaccttgcattactgacccgaggtgcttgaaactccctctcttggaatgacttgtgtattaagcctcacttccctatccgcttcatgagtctcgtcgctgaacttgcactccaagtatttagttttagtcctgctcaacttgagactttaggtctgtctccaaacctcgaatcttgcgttagcactggctcacctctcgtcgactagtactatatcatccgcaaataacatgcaccatgtcacccttgaatgtggcgtctcagtacatagcaaggcaaataaaaacggactaagagttgatccctaatgcaaccgcctcacgatcgagaagtgcttcgaatctcctcccaccgtcctaactcgggtcttagcgccatcaaacatatccttaatcactttaatgtatgttacaagcaaaccgctagcctccaggcatctccatagaacctcaggactttgtcataagctttttctaggtcaatgaacactatatgcaagtccctcttcctctctctatactgctcctccaacctccttacaaggtgaatgactttggtagttgatcgcctcggcatgaattcgaattggttctcggaaatggacacacttctcctcacccttgcttccaccatcctctcccaaactttcttagtgtagcttggcaacttgatactcttatagttgttgcaattttagatatcacccttgttcttgtataattgaatcatcgtactccacctccatacttccggcatcttcgtcgtcttgaaaatgacattaaacatcctagtaagccaccccaaaacctgcactacccgcgtttttccaaaatttcacagggatctcgtctggcccagccgcttttctgtactcatcttatgcatagccccacaacctcctcaacctttatacacccgcaatacccaaaatctccacgactcttagagtgctctaaatcgcccaaaagaatgttcctatccccgtcttaggaatgacttgtgtatcaagcctcacttcccaatccacttcatgagtcacatcgctgaacttgcacaccaagtattcagttttagtcctgctcaacttgaaacctttggactccaggatccgtctccaaacgtccaaaatgaataacatattcaaatgacaaaattgcccttcttccaaagccatttctttataccttcgggaatttccaaggttataattgaaaacatgactttatccaatttaaaagcaaacacatattttagattatgcaccatgtatcgcatttgtgatagcatgaaccaaacatccaccaagacatgtgcactaaataagaaatgaattattaatccatgtattacaatctttttattgaagataatgagcaatctggtccagtttagtggatgtaattgctatttttatttgtttagaagctaggcggctctattacttttagacaaatggtcatccaactagtactgtgttgtgtgtcaattgatttctccatgttgtccacttatccaggtccagtgcctgatggtgctgatgcggttgtgcaagtagaggacactgaatcaattgcagctgtttcatctgaaatgaagcgagtgcgaatattgaagcaaactaaccctggggtcgatattcgtgcagtggtaagaacttgatgctgtatcttaggtatgtcttctgcatttatggttttgaaaaagttggttgcttgtaggctggaagaattgcttttggaagcgactttataattgtgtttcattttctgaaaagcaaaacatagaagacaactgctttatttcttagaacaaacataccaattagtggtatttaaataaacaatgtatttaccgtgttatctaaaaactattttacatatatgcatgtctgtgtttgacctcattctagagagaatgagtgacaaggcatattgcattcggatttctggcatggttgagcaatagaaatctggatattggcatgaatatttccggaatattgatccatgtattttagtaagtgtttttatattttgaaatgattagttttattaactagaggatctagtacataaaatgtttggcaatgagctgcaccctcagacctaatgatacattaagctgactgaagtttgtttctgcactactgctgattggtgcggctatcagcaatttgtgccaccctagggctggtccatatgacggagaagtgagtttaatggtcattttgatccttttgcgcgtctgaactatcgatagcttacagcatagtagtgcatgttaacttgttatcttttgctcgaatatgacaacccactgattttgagtcaagtcagttttaatgcatcttcataaaattcttttgccccctgagagccataagctataaactatatactccctctgtcccaatttttgtgacactcgttcccttttagtccatcccaaaaagaatgtcacctttctatttttagaaacaatttaactacaaaatttgcactttacccttaatgagatgatttatggccacgcggatgtagaaaacttattctagaccacaaatttcaaaagtcttcctttctttcttaaactccgtgccaaatcaaacggtgcctcataaattagagtggagggagtatttctgttggaatgctgcatatttaagactttttttttgagaagtttaagactttttttttgttcggtaaaagcatatttaagaaaatgttctccttatagctgcttaaactttattatttggctgttctttttggaaaggaggctataggacttgaaaatggaacaattgcttttaattacttaaaactcattttgactaccatcgtgagtgctcagttggtcctttttaactgctttacatttatcttttccagggatctgacattgcacagggtactatcgtaatgaaatctggggagcgattaggtgctgcggaaattggtctacttgccacagtaggtgttgtcacagtgaaggtatttgttttatttccttgcagtttcgatgctataacccataatggctgcctatttctgatgtcgcatttcgcattgctgatatacaggtttaccctagtccaaaagttgccgtcttatcaacaggggatgagcttgtagaaccaacagttgggagattagaccgtggtcaggttgtggaagctactatgacgttcctttttaaaaaaaattatctgatgctcacagtggcgatgcagttgccatgataataacacttcttgtctgcattagtttgtgacttcaaaaagaacaacaacccagtataatcccacaagtggggtctggggagggtagtgtgtacgcagaccttacccctaccctagggtagagaggctgtttccaatagaccctcggcatccttccctccaagaactccccatcttgctcttggggtgactcgaactcacaacctcttggttggaagtggagggtgcttaccattagagcaaacccaccttgtggaagcatcttaataaatatctaaagcatctcatctatattctggaatgttgagcatagatatgtaaattgtttgcattcacgcagcgaaatcccattagtttcacctcaacgtcgctcttcttatgctgactaaacttgtggtgcatatatatagctttacttctacttatcctaaaaccattaatctttagaatccttcttcaatgtacaagcttttggttgatgccctcgctggttaccttaattagcactgttaagtccgatattaattgaaggaatgtgttttgttctccttatgtggtattggacaatccacccttcaagagctaggttttgagattcaattaggcccaatgtctatttcttcacatagtatcgtagccagacccaagctatccctgttgttgggtttctcaatgttaggctccgtgttatgttattgatgctccaattgtccagtcttgggcgtgcggtgggtttaagtcccacattgattgagagtgggtttgtggtctcctaatatgtcttgggcaatcctctcctgtagagttagactaaagatacatttcttcacaagcacaaaatcgtcagcaagtagcatacaccataggacctcttcttgcattatattacatttgttgataatatcaacaaatatttcaaccaatttgaattttatattattcttagaaaacctttatcttttggacctgttctcttacaatcagcaaaaccattttgagacttcgttaactaaatattgaggaatatcaattatagaacatccacttgtgcatccataacctaatgatacttgtcagattgggtgttattctttcgctagcttgcagctcttctttcatggaaattcttcaataaatttcctttttctattacgtatattgatgagatttcgtcaactaaatatgaggaactgtcttccttcctttctatcttgttatgctcaggtatcttatacataattccctcctgctcattgcatggttactatagtacttgtaatctatgttgtgtggactctccaaaaatgctgccgcaccgtgtcggatcctccaaaaatgcactacttttggaggatccgacatgcacctggcgacatttttgcagagtccgataaacatagcttgtaattggcctatattatttgcaaagatattcgcctctggcgtattttacttaatttctatttgtcacaagcagattagggactccaaccgtgcaatgatcctaactgctgcaacacagcagcaatgcaaagttctcgatctcggtatagctcgtgacgatgagcaggagattgagacgacactagacaatgcatttgcttctggaattgacatccttgtctgctctggaggtgtttccatgggagaccgggattttgtgaagcctttacttcaaaagaaagggagaatattatttcagaaggtaatgctggcaatttctgtttacagattttgggaacttgtattttcaaagggtaatgctcactgcggatgcttatgggattgagctgggagcttgtgctatacaatagtgtttcttgcttgtatctacacatgtcttactttagggcttttttcacttttggctggtgccccaatataattacgggctgtggctcaaatatacaaaacatattggtatgtatatacacagatatacatcagtgtttcttgcttgtatctacacacgtcttgtatctgtgaaatcagggaaataagtactttattttcattctttgcaaatccaggttctcatgaaaccaggaaagcctatcacatttgctgagatcgttcccagatcatccgacgggacttccggtaagattcttgcattcgggctacctggaaatcctgtgagctgtttggtctgtttccatctctttgtggttccagccattcgacacatctctgggtgggcaaaccctcatcttccaaggttgcgaagagtgcccctcaatcctttttctattcaacgtttggttgatttatagtcgtccaatttcactaaagcagtatctgtttctaataattgtagagtgcaagctcgtgtaaagcattcaattaagacagatcctttccgtccagaataccatcgagctgttatctcctggcagttgaatgatgggtcgggttcccaagggtaagcgtcttattttctgtttttgtttctctttctttcagaacatgcagttccatccaactataaactttgaagagtaaattttgagagttagcagttaatatcattttccaaatgtattcatcaaaatatcatttcccaaatgcacttactggtgtcatatatgctggtttcctggatttttagcctattgtagctcccttcttgtttattctttgtccgatgtattgcatattgcaaattatgaagtgcttaatatacgatctttttcagtgataaaaaatcatttgatgtgaatgctattcttttatttgctttgtagtcttggatgtacaatatatcaataattccaaatttgacctatttgtaacacatgttcgtgcttttaaccggttcatagatcacaagattgtacatttttgctgcttcattgtttctcctgtaaaatcctaaggggttgtttggttcaaatcctaaaagattcatttgagccccaagtagagcaggcggttcatgcatctgttgatattttgttttggggaaggagagaagaggggtcaaggttaagatgtccaatacttcgttcatgctttattaactgttgcagtggatggcatcaaatgcttctttttcctctttatgatttacaggttcatggctgagagtacaggtcatcaagttagtagtcgacttctcagtatgaaatcagccaatgttttgttagagcttccggcttcagacgcttcattaccggctggtgctttagtgtctgcaattttgatttctgatataagcaattcgccagggagcaggaatttgcaattgccaggcttaagtagcatccaacaagaacataagccagcagctgcaaatactggcagttgtgaagattctgaatttagggtagctattcttacagtaagtgatactgttgctgcaggattgggacctgatcgcaggtaatttatagtagggagctgcttctcttctatatttgccattgtattaagttgctcctttgtttcgaacttatgttccatatattacaatatttcataatatcttactatatgcgcgcttatcttttctcctttcttccttctgcttatttctaatcctctatttccttattattctgcattcatgcaaacagttgagagagaaagagttcattactgccattttggcatgcaattttctgttagcttgtaatttgttaatgacatgcatatcgtaagatttaagcttgttaaactgaaagttactcaggaaagatggtatgtctaactatttgcaagaaaagaggaagtacttcaaactttatagtcattggaaaccattgttaagaatgaaactcttattttcatttgcctccataaccactatgaatgaatgacctacatctatctcttggtaaaagttacttcatttgcttccacccactataaatgactactctaactactctatatcttgagttttaccactctttgtccgtaaatgactactctaaccactatgtcttgggtttaccactctttgtccggagatatattggtgcaactgccacgtcagttagtttaaaattgagagagatgcatcaggatacacctttttggttcgggattccagaagggtcactttagtgatgcaaaaggaaaagttgcaaatctgatattgctccatgtaaaagtgaaacgtgtgtactcagactcttctacaaatattaagctacttcctattacttggtgtttgaatggctcccttctcccacctcttttatataaagacagaacttgcatcaggatacacctttttggttcgtgattacaaaagggtcactttagtgatgcaaaaggaaaagcggcaaatctgatattgctccatgtaaaaagtgaaacgtgtgagtgctcagattctttgctacaaatattaagttactttagttggtgtttgagtgtctcccttcccctacctctttaaataaagactgaagttgcatcaagatacacctttttggttcgtgattccaaaagggtcacttaagttatgcaaaaggaaatggcaaatctgattgctccatgtaaaagtgaaacatgtgagtactcagactctttgctacaaatattaagctacttgctagtacagtattacctggtgtttgaatggctcgtgtatcgttaattaggaacccatcactttagcttccagaagaggcaaggtttaccatcctaatgataaaacaaccgggaggattccttgtggtagtcatgtttgagaagttgaaacttcgcggtaggcatgtgcactttgacaagcctttctccccagaagaactagctctgcttctattttttccttggttttccgggagataaaagaactactactgtacaattgatttgatctgatggtatttcttttctttccacttaaaatgtctcatttgcaagtgaacattttgtcaaatgcgtagatattctattttgggttcatcataagctgattactttaaaaaaagggtaactcgctgccactaagctccggctatatgcacggggtccgaggaagggccaaagcatattgggtcttttgtacgcaaccttaccttacatttctactagaggttgtttccgcggcttgaacccctgacttcctgttggcacggaagcagctcttatcatcgcgccaaggtccccttccataggctgattcctttctatgcattaacattattttttgttaaagaaatggatcttgggcctaactcaatcccaaaagctagttcaagaggtgaggattgctcaagccatactaaggggatcattcatcccttaaagcaccgatgcaggactcttaaccgacacctggacatctggagcgtgggaatttaatatgagggcccaacatcgggaaacgagaattgggatgaatgcagcgcttgggatgagtgcagcgctgataccatgtaaagaaatagatctcgggcctacctcaacccaaaagctagctcaaatgaggatttcccaagcctaaggacactcatccctttaagcaccgatgtgggactcttcacagttttcaccttttggataaatttacatgactgcttgatattttcttgctcccataatatgttagaacccattagaaaggctccccttccctgattatcaactggtttgagtttctttttgctatatgatctcgcagtggtccaagggcagtttctgtcgtcaattcatcgtcagaaaggcttggagggacaagtatagttgcaacagctgttgtgccagatgatgagcaaaagatcaaagacatgttgcagaagtggagtgacattgacaaagtggatcttattcttacccttggtatgctcctaagttattatggtcatggtcccatttctttgccgagctgataatatttttttgtaaattactcttattggatgagtcaggtgggaccggctgtacgccaagggatgttacccctgaagctaccaaaagtatgatacagaaagaaacacctggtcttctctatgttatgatgcgagaaagtttgaaggtatcaaagttctcatatcactgttattccatgggcattttattcaattgcatatgtattaattgtggtaaaatttaactgatagtttatacacccttgtctgtataatcttaacctagttcattgccgaaactatgggggcgttgaaaaacaatgaaaagatagaactaggtgcacaaccacatgctcatgtcacaagatctttgttgcttgttaccacttctgaaaagaagataatttactttacaagtaaaatattaggataagaagacattctatgacgttgtacggagataacaacagaccaagtacttagttgaatttttcctgtctgcctagctttgatagacagagttatccgggggatagtcgaggtgtctgtaagctggtccagacacaactgttatccaaaaaagtatataaatgaaataaaagggagaaggagtaagctttgaagctgactctgttctggcccaaaaagagctgtatcccaaactacaccccacccaccatgaaaagtatctcaagctttgaatttgactcttttcctcaagtataaaaatgaacgtagagaattcaagttaagcaagtgaattttctgtctgcctttctggtggccttcttgtataaaagcaacgagggatgtgtatcatcaaacaactaatgacgtgaccttcgttagataacatcagatatttaatcttcgtcaggatttctatatatctctgttagcccttctccgatggttgaacatttcgcatgcttactcaaggccgctataacttttttccctgacctaaaaaaatatttgaatttcttctaatttcatgatgcatctgacttcacacaggtaacgccttctgcaatgctctcacgtgcagcagctggaataagaggatcaacattggtaaggccacaagtccaaactaatgcatctttattatcatgcaccacaaaacacaccaacacaaagtgattgatatgccattgaatttatcttcacattgttgtggtgatacataaaatcccctcttcatcattgctcttgaaactgatttccacttcccttttttttacaaaacccctacgctaccaccaccttttttcttaccattagtagtatcattattgacaagaggggttgctctgatggtaagcaacctccacttccaaccaagaggttgtgagttcgagtcaccccaggagcaaggtgggaagttcttggagggaaggatgccgggggtctattggaaacaacctctctaccccatggtaggggtaaggtctgcgtacgaccccactagtgggattatactgggttgttgttgtagtagtatcattattattattattattattattatttaattcagaaccaacttcattaccaatataataaactaccatattatcagtccacttcattctttgccaaggacaagttttactcctcttcccatcttcaacactgatgttatcatcctcatcactaaatgtcaagctttgatttttagccttgttaccaaatggaaaaccttgtctcaaaggatttttgttgttgttggttttcagtttcttgatgtccatatgaaactatggggtgggtggggtgggggtgggggtgggtgggttgttgttgctgttgctgctgctgctgctgcatgtggtgaggattttgttgagggatttgatggtgtagtgacatttctaatcctaacataccaggacccatatctgaatatatactactagaatccatcaaaataatttttaaaaaatcaaaatcttgaaaaccctactaagcaaaatctcacgtgcagcatcttttattatcatccataaaagatggcttgacatatttagagaaaagggatattttgcaggttctctttctaggttgccggctccgactagcttgcgatttaggcatagttgctgttgttttctttcagtaatcaacgtcatattcctgcttctgctttcccaatctccttcctaccacatttttgtctcatgttcttaagtcactcagacttatctgaaccagtggcaatcatacccgtttggacataaaaaaaaattcactttttttcgaaatcagtgtttggccataaaattttcaattttcacctaagatgtatttttgaaaaattccaaaaagctgttttcaaaattttcaagcaaatcactcacaaaacttcagaaaaaaagcccaaagagagatttaaaaatcagacttcaagttggtgtgccgcgtgttaagaaggcagagaccgccccaggcttcgccctaattcccatctaaggttgaataagattagattagtctcgctaaattcgttctcgaatgattcatcgatggaattaggcctaggtctatgaaaatttcttgtgattccccttctttcttcgacgaaggcatacacgcatcgatagggaacccaaagaagagctagaaaaaggaaagcggcaccttaacttaatagctccatttcttgttcctgagcggaaggtacgctcagcccctgatacattgctatttcttaatccttgcggcaggggataatgagtcggttggctattagagtatagcctctctcggggttagcgataagagtacaccggcccgtgtggtagcgggcgaactaaggatttcgtgcttgcaaggaagcgtgcaagtgggtgaacgcatcaccagccaagctagtcacttggaacataggggtattcaatccccgagcttctgggccttgagaaccgaaatattcatgtccaaacacaactctaattatcaaatatcattttcgcttgaaaatatttttcacttttttttggtattataattcttatgtccaaacgcccacttaggcattgggaaactcttgtcttctctattagatatagggaagctgttcaatctgtgaagtacagccactcttttctttcttagagccaaatgcgacctgcattaagttgtaagggaacatgtacaaaagtcgaagtgattgaccctcttcaatttgggttttttacgcaaatagtcggtcaaattcaatgtttacttttgctagccggtttacagactgtgcacatgttatacagttatacatgaattatacgtttgccgactatttttagttgaagcgatttggtatgtcaaattctgaacctgaaattttgccttcacaatgttatcagatcatcaatatgccaggcaatccaaatgcagttgcagaatgcatggaagctttgctaccttcgcttaagcatgcgctgaaacaggtaaggggcgacaagagagagaaacatcctcgtcatgttcctcacgcgcaagctgctccgacagatacttgggaacgcagttacaagttggcttcgagtggtgtcgaagaacatggttgttcgtgttcccactaaaatctgactccgaattttccattgagttatgttgttatgggttactgaagtatctttgtatatatacttggcaaagtttacttcctacttggagaatatacaccagagaaggaaaattaatattttccttgttggaattttctgtttcccaaaagttacgagaaaatctttgatctatttctttgtttgaactccacgaaaagaaaaaggtgtgatatgagacataacggatgcgtcgggatggacgtcaagtggttggtattatccgtcctggaccagaacttcttgtttccgagggcgaattgatcaaatcctaatataggctgatttggtcagggagatgtagaagtggtacttgttcaaggacttttgttcttcttgacatttattattttgacacaaatctttttggtacaaacagtttgaaaaggttgaattggccgaaatgaatttcttgaagcagttttgactttttttcctacaaaatatctttgcaccaaaataaccttactaaaaactgttaagtaattatgggatgaactttttcatatttattggatgatttttaatatgaactttttcttgaaagaagtacttttttattttattttttatattttacttacataatttttttaataaaaaatacttaataaaataaaaaacttaaactgattttcttcgaaagtacttttttgaaaagcacttttgaaaaaaaaataaaatatttcatagaaaaaaacccaagaagaacatagtactttttattcgaatacatttacaaataatgttcggtctatttgggttttctgtttggttaattcgtctttggagtttattacgtaataatttgataacttcgaaaaaaagcattaaaaattcaactgacatttttcaattaaggcaaaaaacgcactctaagtaagtttacagacatttttcaatttttatttttcgtttcgtaaaaataactcacttgattcaattttttgtcctaactttagtgacaaaaaataaactttcatcattgatcctggacaataactttcattcaaggattattttttattcttttttggtttctgcaaataaatgagaaaatcacagaggatttagcaaagaaaaagtcaatggggacctattaatgtacaaagagcaattaagaagaaacaaaagatcctctctcctgttgtcaccaaaaaaagcttttaaataatgagctaggccatatttaaaagaatgaactagttatattcacaaaaaacaatatattctggatttacatgacttcactagtaggtaaaatcatcatcaatcgtttctcccaaagtttcacactccaaaagtcataactcaaaccacaccaagagagatcacagcagtaaaatgatcccaaccaaaaccaatataaaattcttcaagaagaggaagcaccatcagtagtagtagctaggagatttcttgctggtgggaagaaggcaacagcacctctatccggactcgaaaacttcctgtaaattgctttcagcttactttctgcagcacccaagtgacaactaaccaatatctttgcacattccctgttacacacaaagttaaaaaaacacatgagactaaagaaacttaatatcaacctaatttaagatactaatactgaaatgagtttgttctcgaggaaaattacatcaactgatcttcggagtacccagtatggtgctgcagagtttgagtccatagtggagttttcttgagagtgctacgagcagcataaatggacgatgctgctagcattgatgggcagtatgatattgtggtcttgtagttcataagaccaagttcagcaaaaaagaatgtcatgttctccatctacatcaagcaaaagaaattttattagccaacttgagataaaacaagaattgatgtcaaaacacatacaccattatgtatataatatgtatacagtatgtatacttcatatacaaaacatattgatttgcccgctattattatggagggcggggccaaataaggtaagtatcccaaacaagaattcatgtcaaaagatggaaccagaaagattagtaaagtacctcctgattatcagatggtgttgcagctttaatgtacctaaccagaaaaacatatggtgttggaactgtcaaataccattccaacttcccaagaattgctttctccatctgaagtatttgctgtctggcatatgcattgtctgatatatgaataaaatcattcacctgcagagatcaagaacatatcgacgtttcagcctacacacaacaaattactatagtatgctgaaatgtgcataatatactacctctggtgcccaaatctcttcatatttgcaagcaattagcattgagctaatgccaactaactgaagttccttccttggaaccgtcttcagcgagaggaatcggtccagtatgttaattgtaaggtaaaggctctcaggcataagctcaaatttcctgtgaacttctattaaccagtccactaaaatggctctcatcttatgattcagttctggttgaaagttcatgtactcatccactcgactttccccctggatcagacaatcacaaagcatatgagattctaaacagaaacagaacaagagaatgagattcacaaaatatacctcagtgagcttgtagaagttgtagatatcctcaacatactctacagcagccaaatgattatcagcatcagcgacatcgatgtcctcaatctcattctttggtctattggaaagtccacaagcagcctgagaaagaaaccaattttatcaaaatcttgatactactacacagtactattgatctgcaacagcaacaacaacaacaacccaataaaatcccaccagtggggtctgaggagagtagagtgtacgcagaccttaccctaccccagagggagtagagaggctatttccgggagaccctcggctcagtacgatctaaagagagaaaatgtatatgtatataaccttgcttctagcagtgagggtagaagtgagagtctttccagacttctttgcttttcttttgctcaatggacttccctcaacagtcttcatttccttatctgatgccttcttcttggctggtacatctttattgacaacttctgctagtggtttctacaaaaaaaattttaaaaaatcattatatccaccatttcaagattcttgaaagtttcataaaaccatttacaattataattgtttaggcaaatttccaccttgttcttctctgcttgtgcattagctagcaactgtgcacaaaagctcctgaaaaagaaagagtgttgttatataggagttaaaaacagacagatatatggccaaagacaatacacaaaaacaacaactactactatgccgcagtccaatggaattccaattttttttttagagtatttacctagtcacagggcgagaaatctgagctgctttaggctttccttctgcagcaggagcaggcacaaggttgccaatgtctccgagagcacgcctatttcttccatcggcttgtccatttttctgttttcctcccatttctcctacagatgtaacaaaattctcatgagacaatggatttaaaatcaggaatttcaagatttaaattagtcaggcaattaagcctcagtcccatgtcagttgatatcagctatgaaattgatactcattagcagaaagttcgataatcatatacaacaacaacaacaacccaacaacccaataaaatcacgaatgtctgaaaacaagaaaaattcagcatcaaaactgaaagatcgtgttttttttttgtgagataaaaataaaccccaaatgagcttaattaaaattcagtcaaaaattggaaaacaatgtaaaaatactaaatattacaagaaacccactataataagcacacacacacaaaaaaaaaatcattttttctgactgataaggggaaaaaaacccaaacgagattcaattgaaactaacaataccagaaaaaggaaagaacccagataaaatttaattaaaattcagtaaaattcaattaaaaatcagtcaacactagataaacaatgtaaaaatactaattattacaagaaacccactataatcacacacaaaaaaaaaatcattttttctgactgataagggaaaaaggaaagaacccagataaaatttaattaaaattcagttaaaaaaaataaaaaccaggaatattttattctaacctttgggtaaattgtgaggagcaacaacaacagtattattatccatttgaaaatcttcttcttgttcttgattattatactgaccaaaaacaccacctatactcgcaaatatcgatgaaataaacgattggagacgaccgttacccgcctctcctctttcactatctcgagtcgccactatttctcttctttgtaaatatttcgcaaatatattgagtttttcttcagaaatttgtgagtgaaagagagaattttggtgatactattagggtttttatatggggcaaaattgggggaaaaggagcgcttttgactttaacggtcatattctttggcgttttgaatccggagcgttagatgggaaatgatcggacggttgagatttagtttaaaggcttttttcttactagccgttagacggtagtgagcttatgggagaagatattggatgttaccgtttggtaaataaatttcggccatttataaatttccttttagaaaagtacctaattattttttcagcatttataatttttttgtttatgtatatattaactgaaataacagttttccttaaaagaaatagcgcttttttgaaaacattgaaactaatatttattttgactataagtgagcaataattaaaatatactgagtactttttttaaattatttgattttaaaattactcttatataataaacaaacattttacagatcataattagtaaaaataatcttacaattatttataaattacagccatttatatatagaagtggttctcttattctcctagctttttatttttatttttatttttatttttatttttatttttatgtatatataaactaattcaacaacaaggacccagtaaaatcccaataatgtagtctggggagggtagtgtgtatgcagaccttacccctaccctgaagagtagagaggctatttctgaaacacttggctcaagaagacgaaaagatacaatatcagtaccaccaacatataccataataaaaaataacaacaacataaaaaacagaaaataggtgtagacctggccctatgaaaaacaaaagagtagtaagatacaatattgccactagctgtctcacacaaaactcgtaccaaacttgcctcacaaaggtacgaactaaggaaagactcaactacctcctaacctacaaccctaatacgacctccacaacttactatcaagggccatgtcctcgaaaatctgaagtttcgccatgccttgcctgattacgtctccccaatacttcttaagtcgccctctacctcttctcatgccctccaaagccagctgttcacacctccttaccggagcatctgggcttcttagcttctatgaacgcgtccgaaccatctgagcctcgcttcccgcatcttgttatcaatgggagccatgcccagcttctcccagatatcatcattcctaatattatccatcttagtgtggccgcacatccacttcaacatcctcatctctgctactttcatcttctagatatgtgcgttcttaacaggtcaacactcaaccccatacattatggccggtctaaccaccgctttataaagcttacctttgagtgtcagtggcactctcttgtcacacacgactccaaattctaacctccacttcatccaccccactccaatacggtgtgtgatatccttgtcgatgtcccctctcccttggataaccgacccaaggtacttgaaactgcctctacttgggatgacctgtgattcaagcctcacatccacgtcagttccctcgactcagcgttgaatcaacagtcttccttaaaagcggtaacacttttttcagaaagaagatttaatctggatagccgtttatctaatttcttaaactaaaaatagtcagtggatgtataatatatgtatgatgtatgttccatatgtgtataacggtgaatctgaccggcttgtgtaacaaccccctttaaaaagaaggacaacctgatacacaaaatatctcgcattcacgtatggtccgaggaagggctacataccaaggggtatgatatagacaacctactttaggtgttgtcctggttttcttaccatatttggttttcctatctcatgaagaaaaggacaacatatttaccataattggatttttctttttctagaaggaaaatataattcttccatgtttggctagtcttttttcttgtaggaaaaggtttggacttctgtaaattgaggatccttccttctcattcagcagcatctataatgtagccataaggggttagagagtcgtgttttggcggagaactttacgggacaagtgttagtgtatcacttgtgtttgcctcttcgtgaggttgttctctcgatatttcatactctcttttatatagtggattgctcatatccgcccgtggatgtaggtcaactagccgaaccacaataaatatttgtgtctatttggtagatttctcttttttattgtctgatttatcgtcgtacaaggttttctttactagctcccgcttgacacctgattatttgcggtcctaacaagtggtattagagcgagattcaagactggttcatcttggcgggtgtagttctaaccacaacctatttgacggtaatcatgatttctttttgagaaatttgaccggagtgctactctcgtaaagacaaactttgtggtggagatttggagatgcggcatgttgaagattatgtgaaaaggcgaatcaagtttattttgtcagaaaattcaggtcaagggggagaaatgttaggtattgtcctaattttcttagcatatttggttttcttatttcttgaaagaaaggacaatgggttttctttgttgtagaaggaaattataattcatctatgtttggctagtcatttttcttgtagaaaaatgtttgaacttctataaattgaggatccttccttctcattgagtagcatccacaatgtagccatatggggtttgagagtcgtgtttagggggaactttacaggacaaatgtagtgtgtcacttgtgtttgcctcctcgtgaggttgttctctcgatattttgtacgctcttttatatagtggcttgctcatctccgccgtggacgtaggtctattagccgaaccacgttaaatatttgtgtctcttttggtatatttctcttttgttgttggatttatcgtcgttcaaggtttgcttcactagctcccgcatgatacctgattatttgcggtcctaaaacctacaacattagtggttgctttcatgactcgaaaccgtcctataggccacacgaagaccactttaccgttgctccaaggctcccttcattttttttaaaacattaaaagtaatatttattttgacagtaatgagtaataattaattaaaatttactatatttactaagttattagatattcgatgttaaaattattcatatttgataaacaaacaatttacagatcatatagtaaacatgatttaataaaaataccaattaaattaataaaataatcttttctacataagctcttataaatataatgagtctttaacccttctaattcatatatgtgctctataaagattttttatagtattagtatcatttacaaaaattactggattcacgtaaatcatatctaatactatagatccgcccctgtttataattctggtaatagtaagattttaatgttaaacagctctgtaccatctccaaatcttgctttcagttacaatgtcttaattcaagtgaagaagatgcttctcttttcctcagaatgttaccaattgtatataacaagataattttttatttgttaatatacaaatgattcatatttaaggtgtgtttggtataatagaaaatgttttctgttttcttgaaaaataagtagtaatattatttatttttcggtgtttggtacacaaattaaggaaaataacttctcgaaagtattcataaataatttagatacaataaacatgaaaccataaattttgaaccaacaaccttccgaactcacaaatttcataaacttctgaaccgctaaactttcgaaacgtaaactttgtaatttctaaacccgcaaactttcaaacacataaacctccgaactcataactttaaaactcgtaaaatttcgaacatgtaaactgaaaaatgaaaaacccaaaactaaaaaatattctttttttgcgggggagggggtggggatgggtggtgcagaaaaacggaaaatcaaaaaacagaaaatttaaaatacaaaaaagaagtaaagaaaaaatgcaggtgaaggggggttggggtggggtgggtggcgcaaaaaaacaggaaaaaaaattgaagttggagggggttcgagttaaatgtgggggtaggtggactttttggaaaacgttttcctaactttttctagcgaagtcattttcctccaatttcaggaaaatgtgatatcaaggaaaatatttttcaaactattttgtgcaacgaaaccgtaaaaaataaaaaaaatattttcgttcgatcataccaaacgcacccttaaatattaatcatttagttagtgcatactgcatacttactttcaaagtaaaagttaatatttgggctattgcatgcagcctgaaattgttggtgccaattggaacaaacagttaactttgtgaactgaaatgttttttgtctagattaaatcattaaagtaaaaaagaatgaaaaaaatgaaaaaacataaaaatgaaaaaaatgtcctagtaaagaaaagaatgtcaaaaatggagatgcgggggatcgaaccccgtgcctctcgcatgcaaagcgagcgctctaccatttgagctacatccccttctgtttgtttatgttattcactttttatattataatataaaaatatattagataatttttttacaagtagttttttaatattttgaattgtttctgagccgagggtctattggaaacaacctctctacctgcattaggtaggggtaaggtctgcgtactaactaccctccccaaacctcacatgttggaatcatactgagtttattgttgttgttgttgttgttgtagctattgaaacttataatacattttgtataacttctaaatatgtaaattttatttcaaaaaagttggaaaatgtatgtccgattttacacagaaaatgtatgtccgatttcaatttgacgctcgtactctgaatatattcaaataaattaaaatgaaggaagtaattttatgcttccttattaccgtttaaaagaagtacttgccgagctgagaagtaaaagatcttatttacaatgctaccattatcaattatggacatagatcatttggatttctttttcatctgatacctgctctgtaaagtagagcatcacatattcactttcttttatgaaatcggatattgaaaaattgttatctcattggttattttttttaaaatttaatttaaaagaaaatttcgagcttttggttaatttattgcgtgtaactaaattagaaaatttgaataatctctgattttcttccataacaattaagtgtgatattttgttttaacgatatctaacgtgcattaatcctcttcaagagtagggttgttaggtttattcatgtgtaattagttcatatgtagaataatgcttttgagtttgggttcaatgcaatggttgccaactctatagtattgatcatgctcgagagggtatgaatcgattgaatatgccaaccaaataaatcgtaacacacataatgaccaactagacctgccaaccaaatgattgttaatactcaatagtgatagactttgtgaaaattcaattgaattccagaaactcgtaccattgccctggcacaatttccaaacttaagatacacgtgacatttgactagattgagatttggcttctcgactccctccttcaaagtgatatagcagacccactattttaacttattttaagtgtttttaagccattttgtagtgtttagataaaagcacttttttttaaaaaaaagctaaaatgaccaacaaaaaaaagccaaaagtttagaattcctaatttttggcttatgcttaaaagtcacttaaaataagcccatccaaacaggctctaagtctaatgattgattaggaactcgcaaaaaacgggaacaaggttcatacaagaagcagtccaaaatctttgaccattttatatgagctttagcaattgtcaatcaaatgaaaccgtatagggagcatctttttaacaagtcatttcaactgagaagtcactgcagaaacacaaataagtccttaacggatgtattccccctttctttgctggggaatatattaggaagcttgattctctcttgagttctacagtttcagatctcgtggaggacactgtaacgagcagcaaataatgctcgtggacaaaaacctcaccccagaaaacaaaagaaaagggtggagaccgtgagggggcatcatccctcatttaatacaacagggaaaagttgtttgaatgaattagttaatgtgaagactgcacaactactgtcgttttggtaaaggaagcaagcaatcatatacccgttccatccgtgatgtaatcctgagtttatgcacagtttgaatatccggcttcgccaaatcgatgatatcctgcctcaaactatacaacatgcaaacgccatgttagagttgtaaaatttcagaaaatatacttttcaaaatcagcgaatgtctcatgccttgaacaaagcgaggcttaagataaaggacaaagagaaacaaaccttatccattcaccagtcgctcttgcatgtccttccacagcacagtataagcgatccagataatataatgccaaccccaacatgcattgagcatctttttcctgaagagttgggggaaagtaaaaaaacagggaatagaaaaaccaaatacaagaactcaactccaagctatggcagcattacatgcaagcacctagttaacttgttggagaccaaaggatttatcgctttgctgttagggagagcgggattgagtaaagcttctaaattaccagatgaaaatggattgtatgatagtgaaagaaatatgagattctcaaaggcgcaaatactagtgtacaaggatcaaataaagatgctgataaagttcaaagggccttacttgtccttgatctttgcagctttctaattgcataatctttctctctatctccacaatcagcagtcgtcgttgaattcgagcaacccttcccctgccttctgctctcttatcctgatctcattcaaaagttaatgacattatatgattttgcacaccacgtcaagactcttaaaataagagaaccacattaacaatcaaacatctcagccagtaatttccatttccttgttagtttcaaaaaataatcactttctcatgtcaatagcattagaaggggaaaagagaaatgaaggaaatattcgttgaagttgtcccgaaaaacagttgagtccactttttaggtttaagatgcaataggaagtgcccaatcctttaggatctaagaattgtgtacaattatcaagaatattatttttttggacaaggtgggttgctccgatggtaagcaccctccactttcaaccaagaagttgtgagttcgagtcaccccaagagcaaggtggggagttcttggagggaaggatgccgagggtctattggaaacaacctctctatcctagggtaggggtaaggtctgcgtacacactaccctccccagaccccacttgtgggattacactgggttgttgttgttgttgtatcaagaatattattttgtataatataatagaaactatttctgttaattgcataataagtctccctcatcagaaaactgcttcactctatctctttctctggaaaactcctctttatctatttctttgatgagattggaaatattccctcatttatcacctatactccaatactccgtctagaactctctgaattttttaccatcctttccttcagtaatcttacaacaaacaggacaacagaagaaagagtagtagctgaaccaactgacatagcttgataatcatcaaaaacagaggcttcaagaactgtgtgaacgggatgtgggtagaagagaaggtcttatacaaaagtggcacagttaagcagtgctggaatactctccctacagttcctcctctttggctctcatgcaacaaaaatcctaatccctcttacagttatttttaatagactaaaattatgttgcaaaaattcaacttctgtattcctttggacttctaacaattaatttgccttatatggttctcaagtgacaatggcttaaaacttttgatattgcactgatctgccttagggtattcctgatcaattttctgaatattcctataaaacaggggggggggggggggggggggggggggaattctaagtatgatataaaaaattcatcatggtattgtgagctcaattcttgaatggaaatcaaatataaacgaaaaaaccaggatcacaagcacttaggagaattctttagctatgcattaaaaacaatcatacacacaatgaaacagtgtacctgtttaaaccaagtgcgcaccaacatgatcacaacgagggagaggaagaaagcaggcaaagcagctaaaatagcaaagttgatttcattggccctaagaatttgatccagctccagcatagccctgtttaaagtatgaaagtcagagaagaaaataagaaaagccttaaactctcagaagttcagaatttcggaacaagcatatcagttgctctcactcactcttcaatgtcaagcttcagcttctgaacctgtaatgcagatattgttagaaacatgccaaaaccagaaagaattgattacaagagtatggactatggagtatattacctggataagaagagcacgagaaagctccccagaaaaaagattttgaattggatgcatcagttccttttcatacctaaaatgaaaaatcagttagcaggagacataaaagcacacaccttgttgtactgtggtgtggacccaactgctagtaatatgagaaaaaaattaatcaaaagtagtctgttagcatatatccaaactttgcaatagacttgtattattgcattgataaacattcaacatataccaggaaagtatacaaaattattttgcaactgtaactgatgcagctaagattattattgttgaaagttaaagattctgctgttacatcagaaaccctagtctgttaactagaatgagcaaatagctggtccattctgccaacacaccaaaaggttcaaatcagtcaaaaacttgtcctacagtttccacatatttaacaacctctaacatatgcacgatacagcctgtaattggctgagcaggcaagcagcacaacaaactcttgaaacataagaagtactaccattgtgataaagttgcaaggataattgcttctggaagaggacaaggaccatttgataaactatatatatatatatatatatatatatatatatatatatatatatatatatatatatatatatatatatattttggtagcaaaagatatttatttgaatactaagtagaagttagcccagagggcatcacagaagttgtagcagcactcagagtccctgctagtactgaaagtagagatatagctacttaaggaaacacactcgttgccaagacctgccaatttattgcataaactattcgaaatactcttaaaaattttccccttccttgtctgctgttaaagcttcaataacaaatgatgggggagatgggtaggtcctgattgattggtcgaaaagcttgttaacctccttcaacaagaggtctgctactttatttccttccgggaagtactttataaaaaaacttttataaaaagttgcacataagtattttttttatataagggaaaaaaatacttatttgcattttttgacaaggaaaagaaatgcacataagtatctcaatgagaatatagattatctgccttaagcatctcaatgagaatctagattatctgtctttacttcctactaaaaccttggcttatgaactttctctttggattgccgaagactgtgaggcaacatgaagccatttggtgattattgatcagccaaccaagtcagcaccttggattcaaagttaccagtttctagaactccaagacactggaagtatattatcattctcggattatcagcttcatatacagcagttgggcagaaaaggggcgtcagcatttgtaataggtgctctctgcgcaagaaagaagcagaggatgtaaattgccttcttctgcactgtcaagtgaccaaacagatctggcacatgtttcttaggcttcatttgtttttttttatgattaagacgtctgaatcacaatacacatctgaatatcaagatgtgtattaagattaagacatatgaatctgaatacacaactgaatgttaagatgtgtattaagatctgaattttgatttttaacatctaagtgtaaaagatttatctttatttgaaaataaataaacataaaatactaattaatctaatattctatcaataaaatatatagtttttaaaatatgatagctgttagtggtgatggttaacgggtgaatgccgactagaggcggtggttggtggtagttttggttgatgctggtggtttaaggtagtagctaatggtgataggtaatggtgacgattatgattgaggatagtggtaatgggcggtgatagttaataatggaggatggtggtggtagttgtgattgaggaaggtggtggtgggtggtggtaggttataataatgggtagtgctggatgtggttgttgatagtgatggggtagttagttgtggtagttgaggtgaaggagtgttgattgtggttgagaatgatggtggcggcagtggtggagatggtgggtggtgatagtcgataatggtggcggatatgattgatgatgatggtggtgtgatggtggcggtggcggtggcggtggcggcatggtagtagttgataatggtaagcggtggcggcagttaataatgaatatggatgatagcatcttaatgaaactaagtctctgttatagatcttactcatacagacctactgagacccattaagtggttgtgaagtaaaaaaaaaaaacacacttaatgattaagatctgaatgattattcagactttaaaaacaaacgcatttaacgtttgacatctgaatgattaagattcagacctccatgtgcaaacaaatgaggccttaacccatttagagtgtttgcataatgccaaaatcagttaaggagcttatatggtgatggtctggaaggacgttggagaaagacatcaagagccagtggtctacttgctctaccatcctcttgtgcatttgctgggcattttggctggaccaaaaccacagatgctttgaaggaaaggcagaaccaatacacaagcttaaatagaagggcttgtattttctggcttatttgtgtaaatactgaaaacagtttttcagaattccacagctccccccatttgtaataggaattgaattttcgcttgtacatacttgcacctacttggtgcagttttacatgcataaaatgctttatttatcaaaagtatctcaagtcagattaggttaactgttttatctccacgctcaaccaaataacatcacatggaacaggaagaatgtatataaatatagtgaataaccttcagagatgcataaacaagtgagtacacgaaaggaataacttagatcagatgataggacaatgattagatgtaaaaatattctggtaaaacaataaggaacaggtagatgaatacaacaaagaagtcggtatactctagagtaaatagttattaatgagtaattagctaccgaattgacccaaatgcgtcagtgattactagtatcgtgcagccgcacgtcatttggcaacgggacggcgaagcatcgtgcaagtagcgccgcaaggcgccatgcgcatggggctgagctcggaacatgccaaatgccgtgcggctattgtgggttgtgtccggcatcgctcgtggcgattgatggcttttggcaacgaacggcggagcaccgtgcaagcagcgccgcaaggcgccgtgcgcatggggctaagctcagtaagtgccggacgccatcggttgcggcgggcaacaacgggaggcgacatagctcgtggcagccgcacgtcatttggcaacgggacggcgaagcgtcgtgcaagtagcgccgcaaggcgccatgcgcatggggcttagctcggaacatgccaaatgccgtgcggctattgtgggttgtgtccggcatcgctcgtggcgattgatggcttttggcaacgaatggcggagcaccgtgcaagcagcgccgcaaggcgccgtgcgcatggggctaagctcagtaagtgccggacgccatcggttgctgcgggcaacaacgggaggcgacatcgctcgtggcgattgatggcttttggcaacgaacggcggagcgccgtgcaagcagcgccgcaaggtgccgtgcgcatggggctagagctaagtaagtgccgactgccatcggttgttgtgggctatttttcgtgcttggcggggcttgtcttggctttgcaatgttggcattggcaacagcacgtggctgcgcgtcgcgtgttggggcttttgttggcatgcatcggcggggcaattgtacgtgcggcacgtgagtggtgttcggcttgtgtggctaggttggatccctgctcgagcagcgacgtcctagcccgcaggccatctcagtcatggcacaagcgcaaattcggcttgttcggcgtcggttttctgtgttgcatacctaatgcccaggcattatcaagcacaatcggttgcctttcgcccctcgcgttcgacgcgcggggtgaaccaaaagctgcagttgtgtcccacgccgtcctcgcttcgtcgtgcgacggcttggtccgtgactagtatgctcggactctcggattcggtaaacgcaatgggcatggggtcttcgttggctcctatctgcccaaagaatgctccttacgaatgacggccgtgctcgtcttggacctggccgtgccctttgggccggccgtgctcatgcgacaccggcgtcaatgaggaatgctacctggttgatcctgccagtagtcatatgcttgtctcaaagattaagccatgcatgtgtaagtatgaacaaaatcagttatagtttgtttaagtgaaactgcgaatggctcattgatggtagtaattctagagctaatacgtgcaacaaaccccgacttctggaagggatgcatttattagataaaaggtcgacgcgggctctgcccgttgctgcgatgattcatgataactcgacggatcgcacggccatcgtgccggcgacgcatcattcaaatttctgccctatcaactttcgatggtaggatagtggcctaccatggtggtgacgggtgacggagaattagggttcgattccggagagggagcctgagaaacggctaccacatccaaggaaggcagcaggcgcgcaaattacccaatcctgacacggggaggtagtgacaataaataacaataccgggctctctgagtctggtaattggaatgagtacaatctaagtatgtcttctgagtggccttaataccttattggcaccacatgccgtcccataaacaactatatctaagaaattattgaggtccccatgccatccacatccacagtctaccatcctcgttgtcccatatattaaccttcaagctctaatatcaagaatcaaatgctcacaagtcacaacctctaaaatctcctctctacgcaaaaattgtgttactcattctgatttgtatctctttccttacttgtatatcctcatcccaaaaaaataaatacatagagaaactaaagatacatgtgattacaagcaattcaagacctgtatatcaagtgtttcatagcatctgaaaggatcaaataaaacatgcatgtattttctaaaaaatctaaaaagcaacaagggtgaaatatgaatctatcaggttgcaaccatatcgtgcaaaacggaaggcaaatacaattctctacaatgagtagtattattcaattcctacatattaaataagcaacaaacaaaaccagaaggaagccacacctcatcattactatttcaagcatttgctgatccgttgcattaggtggagccttctcaccctttgtctgctcagtgaaagcttgcagcattctgcaaatcaatatcaaaccaatattattgtaaccggtttatcccaaagcactaaatgcataagagaaatcggttttttgcacttacaaaaagaagacaagacagtaaccattaaaagagtgaaagagaacaagcactgctagagcatcatattgaccataaagcagcatggtgtttctcaacaaggaccacgtataatattctacaaaataaatgttgaaagaaaatgctaatagaatacacagcatttttcagccaaaacaaactggagaaacatctattacagaggagttacaaccacatagagcttcttaagaacttcaaaaaaaaaaaaatagagtttcttaagaaaatatataaaagagcttgtccaacttagaaccttcttctcccagtaagactacttcagtgtcattgctaagagtattgaccaggaaaaacagtccaaaacctaggagtatatggattgcatagaagtccagtaactttcaatatctttttcagatataaaaaatggatgtacaagtataataaaagcaactcattagtaaagcataccactgtatcttgtgacctatctgagtttgcatattgagcacaagatgttaacgaagttgtagttgactaaactaacctgtgtagagagtcagcggttaactgcacttcctcaggttccattgcacccttctgcctcttccggaaagtgtagaaaagatcgtctctaatagagagaagctggtgaaaacaagagctatttagcacaaaaacccactaacacataactcaaatataagatctcaccttatctaacctgctgaacctactcatgtcagcaaaaatagataaaaaatagaagagatcaagagtttcatcatttcaaaagtccatcagaatgcagagatcattaaaacatgttagatatgctatctcattctcagagaacaaatgagaattaaaatataagatggaaaaaaaaaaccaacacgagttaaagaagtgtttcttagaaagtgtgatcagacaaacagaaatagaaaaatcaaggagtgaatattctcctagtgtaatattcatgtacaatgtaagaatctacatatttaagaagattaaaaaaatcaaaataatcttgacctggtatcagcaagaaagcaatcaatattgtccaaaagttacatactaatatgatattaaacgtaaatcaagaattttatgctctcattaaaacttgataaagtcctagatctatgcggtcaggaaatatgtgttctagtcctattcatgtgcattatagatgttaaggatttacacagccaacacaacaaatttggcattgaagcatagttgcttgattaccggttgctctacatggtcattccagaagctacgtgttgagtcctttgcctcacgaatccaattgtcaatgtcagagcttcctaccaaactgctatggcgaagcaaccataatgaacaaatagagatgccgacaatcccacaggtatatggtatccagtaacgagtaactctcctgggctttcggtgaattgtaaccttcaaaattaatggcaaacaaacagtcctcaaaaatctgaaaagaaggtcctcaaaggaagagtcaaactacaaatatattatgataacatagtgcttttccaacacatttgtgggggaaccttttattaaacttactggaaccaaaaggctttaaggaagcattatacttatgaattgccacagcctaattgtcctgatctagccaaccactaaacttccttctgtctaaagttagcagcagacccaccatccaaaacaatacgacaatatgagtcatgtatgtgtgtaattacaacccaagagccaaaagaaagaaagaaaaagaaaagagaagcatcgagagattaaacctggccagataaagatttaaaactgtgataaagagaataacaaagctctttcgcaaatccagatttgtgtttcttcgcttttgtttcttttgcttcggtaataactgatcaagttctagtctccttaagttgctcgctttgcttcatcaccctcattttcaacctcttgattttcactttcttccctcatcttttatcatctttgaacagaaacctcctagtattttcctaatgaaagcctaaagacagccctagtatcagtttaaacatcactctgccaagcacccgtttaaagttaaaaagatattaggatcataatttccaggcatatgacagcaatgagctgcattgaatagaaggaaaatcccttgtttcccccttcaataagatagcctcctgataactgcagcaaacatcagttatgccaattttcttccacaatgttacctaatcaggtaattctgacatctaaaataaacaagtttcactagatgcaaaccaagcgtaatccacttaaataataacttctaagaaaaacaacctccactagatgcaaccctaatatattccacttcataacagcttgataactcatacttaaagataaatcttggcaattaaaaagagattttaatgagagtaacaaatcagttggatttctaaagtaagatactattgtccattcatgttcttgtattgtttactttgcggacagatttatgcatctgctttgtacctcgacagagtataaaatcattgcacaggcgatctatccaagacatgccattcaacaaaacaattgcatgatattggtatgggaactaagtaaaccgatattgaggcaacgcactcagcgtgctcgcatcagatacttgggagatgctactgatattcatacaaactatgtattttacttttctagaattttttattttgtgacatgcgcatccctctacggggatacataaatccttcaaggggggcaccagatagaaacttcaacattttgaaaaataaagttgtggggcgatttataacaaccaaagtttagaaataaaaacgtcatggagtgacctaaataatacagtttttgaatttgatttgaattctgtatgtttgaggaatatctgtattcgaattttctttccatagttgaaatttatgaatgctttttgtacaaaatgtaggttagagataagaccatggagatttgaggacacaaaacaaatgatgtattccagattaatactgtatccctaattttacaattttcaagactttgtgttgtatcccaaccacatacatactaatatacgtacttcagctatacagatcttagttgacaactaatttcaaggaatgacacgtatgttatacagcatcccagataatttgatgatgatgaaactaaattgaatgctaaaacattaaaagattaacagagctttaacataaaaaagataaagttatctcattacaagtcagtagggaactcttacaatggcagctagatatgtgttcaatctgtctatattttggtagatcagattgatggcatctctaatctcacaatcagtccatcgagagccttcttgatttacttctggaagtttctcgaatatcaagggaaaagaatagctttcatcaacagaagagctttgctgcagaatcaattaatggacaacgtcaaataccaatatttgacaaacatgtagctaacaaacaaatgtcatgttcaaacattttaggtgtgaaaccttatcattacacgatttccctcacctggcgcattgcatggaagtggccaattgatgcctccaacttaagaaatagatcattcatttcaaccaataatgatgataatgacttctcaggatccttaaccaattcctcaccagctttgtcaaccttcatatagacctatacatatgccacgaaagattgaatcatcaagctatgcaacattaaaccgactccttagggagattatatcttccaagaacatccaactaagaagcaagatcttaatttgataacccaaaaaaagaagggaacaccagtccgtggaatgctacaagacctgatgccaaaaccaaaactcttcgctctctagtaatctatatatcgaccaatcaaattaagtgaaaattatttagtaaaactcacgtgaagtaggttcaaaacatgcatatgtaaagatgcatatctttaaatttctgattgagattagtgattacttttcttatatcaaatttctagtttcctattcttaactgctaacatatgtgccatcatgtttcctgaacaattaacacagaacttagttttacacgctatatattatttgttactgccctctcaagatagagcccttgggcactgagatgtgcatctacgcaatttagtgctgcactaaagtgccacctaaccttaatgaagtgcccaacctatggtacacataacaaagagcttttaactagaaagacaaaacctcatctcaatcatagccatcttagaacgtttatagaagtgattaaaaacatattgcttattccagaaagtgacatattttacagggacaattcctagtgaagagatataaacggagaaaaggtaatgagaaatttatggaaatcatctcatagatatattgcaactataaaagcaagaaaatagtgtgtaaggcagagcaatgtgtctggtatgaaggctgggatatggactgatggagaactgcactgcaaaatgtaaagtaaactgaaaaggaaaatcaaaattgaaggatcatcttgtggacaaattacagtatccaactggaccctaaacttgaaaagcttcagttcctaccattttggttagaagctcagcaactcttaaggtatccaaaacaaatggctcagatattcatttcctttctacacaaccataataaatgtacataaaccagtatgggatgagaaaaccagtaaggggaacgcttttatctttaataacgggaacactcttacagcatcaaagattgatggaataaactaccaactaatgttatatgattaatcgttcacttgataagtgactcacctgtgccaaaaatgtagccaaacgatatcttaagctacttaagaaatttatcctctcagatatataagaagatgccaaacaatatgtatgttgcaccccagaacctttaccaacacaatcgcgtatcagctgagatgtgccattgagaaatgcagatggtcctctctcacatatcatgaagtatgcttttagagcgtttgatccctgaaattgtacatacataacaattcacttgaattctgtttgaaaaaagattatataagtatatagtttcaaacaaacaaaatagctaacctctgctttagattgccaatattctaagttcttctggacataatgcaaattcagaaagacgcactccataatgtcctccaatgtaccaacaattttagatgcctcacatacaaccctgcatcttagtgatccccagcttagaaacttttcttatgaacaaattgctctctctctctctctctctcacacacacacacacacatatatatatatacacacacatacatacctagataatgcacatacaaaacacacacatatttatatttatatttatatatattctatccctggataatgcacatatgaaatgctaaatttagagattagagaggacttacatagaagattcaggggaagaagaggaggaagggaaaggaagcgggagacaactcttcttacgacgtcgtttactggcgcctgagttgctgccacggtagaaattggaaattctgttgacgaaattagtcgccggaaagtagtaggaaactcgattcaaaaggtagtcagtgtagacggagacagtagtaggttttacgcccattccggcgttttccggcggcggagaatccattgctgagttcactgagttgaccaacgccggtgatcgggaaaatgagtacggagagcttgtgtcgacttagctgaatttaaaatacctgaaaacactttttaaatcttgggctgaattttaaacagtgttggatagaaattggaaaaaaagcaccttttcattgtaaaaattgcaccggacgactcatttaacatatacccatttttttaaaaagttttaatttgtattcacttttaaacaacttcagcccattttctcctcctccttctccccctcaaagtttgccagttacaaacaaaaacttcgtcggttacaaacaaaaatcaagttcgctagttacaaacaaaaacttcagacaattacaaaataaaaacttcagctctagtcagttacaaaacaaaaacttcatctctagcaaaaacaaaaactttagctctagagctgaagttcgccacttacaaaaataaaaacctcagcacacttgctacttcagtcccgtctactagaatgctgaagttttgcgtgattgcctttgctacttcaacctcgtatgctgaagttacgcgaaaaaaagggtacacttgcaattttttttgcaaagcaagcacaagttaaaacatgatccaaaaagcgggtatagatgcaaagaagaataatattacagagaaagagagaaagagagaaagaaaattcttattgaattttgggatgatttacaatgggataagaccctctatttatagggaaagagtgacttagccaccaagtaacaaaccctagaatctctctagaatatagacatttaccataaatataattctatttataacactcccccttgaatgtctattcaacaaataatgtgcctcgttaaaaccttaactaaaataaaaccccatgggaaaaaaattctaggaaaagaaaaagagtacacatgtttagaaatgcgcctttgggttgcctcattaaaaaccttgcaaggaaaacccagtgggacaaaaccttgtaagggaaaaagagtgcaacgcgcattaactcccactgatgagagcatcaattcacatccttgagtcttcgcattccaatcttgtgcactaacttcttggaggttgacgtcggtagagattttgtgaacaaatcaaccatattatcatttgaacgaatttgttgcaccttgaaatcacaattcttgtatatatgtaatctcttcgtataatgtcatggaataaccttttcaacatcttcatagaagtattctcgctatcatattatcatgcttatagttatagcaagatagaaatgtgcataaattgtacttaggatgtaatacttcatgaccaagaattctatttgctttaagcaatatccttaagggattgtcatataagttaagtcatataagccatacaaatagactttagatttgcatcaagttttcatgtcatgccagacatataagatacatgaaagtgattgcacacaccattgaatttatactttcaagtgtttgaactacatgtccaaaattacatatatttcatatgaaaccaattctttcgaattgtgtctttttcatttggccaatatttttgtgtccatattcaacagacttaagatcctcatctatacttagtgctatgatagatgtcgtcgatgatcattttatatcggttccaatattattttttcccataaagacataacatagagatctcttcattaatatattcatgtacctgaatctctcctgagattttatgaagtgttatgtcatgtgatcttctatatcacgtgcctcctttattatgatcatttgctcatcttctttatcaagaagtttatttgacctgatttttctatacactttaagcgtaccatagactttgtccttctaagacttaataggagcatttgcaataagaatatagttactttctttgggtcagcaaatgcgtctggcatgctttgcaatatattgcagatgaattatctttttatgaacttcaagttcatattatcttttcgaggatctagatgtacaaatgataattcattccacgtaactcttttctcaactgtctatcatatctccccctcatgttagaaaaactaactttcttattcaattttgggaactcatctttatgcattatggtgttaatcaaaatatacaccgcacatcaataaaaataagatggaattatttggttcctggccctgaaccacttgtgagggagaatgtaatatactttcgtatataacgtgtatcaaactgatatagataactttgttctcataagtaatagtttagctattaagtggaggcactcaataaatcattttgctaaaccagttgtgatgtaaagcaacttatcaagatgaactgtcttgaatagaaaatctggaaattatgctctaaattaaattattgagcaagttacctcacaaacaccatgttgcgggttaataataatcgcacatgtaaccatctcatggatatatcttacgtggtatacatggcagatgaatgggcccatattcacctttgatatttccagtattcacgggattcaatcccaattttagttggtatattaattaatgagaacaaacaacattagagaatcataaagaactttctagatctttaatatttacccatgtgaattctcttttattttttaacatcatacttaaattgatatggaaaaaccaattatgtcaactgaataaattatcaatattgataaagttcaggtttacaccatgacgtgtgcaattatcaataaactccaagtttatgtcacgacccaaattcccaaccttagggatcgtgatagcgcctaacaccacacttgctaggcaagccaatgttagaattcgattaactacgttgcattatttatccgtttagacataataaaataatctaacgtaaactaaatctattggttgtcagagataaaataataaacaattaaataaaacgaatcacgaactaattttttaatataactctaagactaacccagggtctggtgtcaaaatttacgaactactaaagtatactacaaataatgggctgaaagaaataatataaatgttctgatataataaaacatcgttatgaaaataagagaagactctcgggatctgcgaacgccggcagatatacctcgtgtcttcgaataaacgaataggcgatcaaaatctctctactgttggtcggtacctgaatctgcacaaaagaatgcagagtgtatgtcacgaccccaaatcataacaggtcgtgatggcgcctatcgtggaattaggctagccaaccatcaccttactgcgctttttgttcaattataatagttcacaattaaataataagcaagcaaccacatcataattaatataataaagtattagtgttcccatattaacctaaacaacctcccaagaactggagtcaatagtcatgagcatctaagaataaataaatctaactctgctaaagctataatacatgtccctaaatcaaatactaaaactaaataaggaagggaaatggagaagttgtgaacgctggacagctacctcgaaatcccgtgaaatgttgctatcgaacctgcgtcagctactgctgcgaactagtacttggatctgtgcacaggggcacagggagtctttatgagtacgccaactcagtagtaatgaaaataaatcacagtctgagtaatataaacacacagaacatgtacacaattccacaaaccagtaaaacaccaagtcaccacgtgacattcatcaaataatgagttcgaaatcagttttcagaaaaaccttcgaaacaagtgcaatatcagtatatctcagtaaaattctcagtaaaaccagtgtgaaaacgaagtaaatcatagtttgaaaactcagtaaaaatcttcataaaactgcccctcgggccaaaatcatttatcgtaaccattgcccatcaagcattctcacaatcattctgcccatcaggcatcctcacaatcactctgcctatcaggcatcctcacagtcactctgcccatcaggcatcctcacaatcactctgcccatcaggcatcctcacaatcactctgcccatcaggcatcctcacagtcactctgcccatcaggcatcctcacaatcactcttcataagccccgcgggcatcactcattcggtaccggcgctcactgggggtgtgttacagactccggaggggctcctacagcccaagcgcaataataagccacatcatgacataattcacacacaatataggcccgcatcctcactcatatcatatcatcctcacaatataggccagcagcctcactcagttagacactctcaattcgcccttcaggccatagtatactgggttctcaacccaaaaacagtatttcattttttcaagaagtagtatcaaaatactctgagtatcaaaataatttcacagaaaggactgagtgaaaaatcataacatagcagtgaggaaaatagtaaaaacatcccccaaggggtaaacaaatcggcactaggccccaaacatggcttacaacccaaaacatatcataatgtataaatactatttaagcaaagacttaaaaatcggtttcgcaactcaatagtcgcccaaattaggaaccatgttccaaagtttccacctttttatttcaaaacccgtgaaagggtgcatagtccggggtttcataccctcaggacaggatttaaagacattacttacctcaaaactagcccgaaaactattccgcaatgcgcttgcctctagaatcaacctccgaaggctccaaatctaccaagttcagatttttatcatcaatatgggcttaagtaacaaatttccaatcgaaagatatcaattttactcaaaaatccgaaaccgggcaaaacccgaccccagggaccgcgtcccgaaactcagaaatttttacagaaaagtgttcttcatcttcccacgagtccgtacatataaagaacaccaaaattggagtccgtttgacccctcaaatcgaccttgaaggtctcaaaatctcaagccctaaaacccaatttttctactgtttttcatgaattaaaggctgagattatagtctataatcacccataatcgagttttaatgactagaacacttaactcaatgaagaacaaggatttccctcttcaaaatcgcctcaaaagcttcttcttgttcaaacatttgaagaaaactcggactgctcgttatacatacgcttttcacgcgttttactgctcccaacggattccttgtgaaattctaatgaatttaggcttttgaatcactcaatttgaccttataatgaaggagatatgtagtttttaagatttgcaaatagtgcaggtttttaatacgccgtcaggggcaatttcgtcattaacctgaaaaatctgggcaatcttggtaaaatcgccatagaatcctcatacgatgcccaaattcgatgattctttttgttacgggtccgtaattacgatacggatctaatacttcattcaaagaagtaattggagctcctttgttcaatatgatatcatttatgcttgaagaaacgacgtcgaagcataagaaaacgagcacaacgcagcccaaacctatccaaaactcacccgagctccttgagaccccaaccaactataccaaaacatcacatatgatcattcaaaattagtttcactctcaaaacaccaaaactaacatcaaaacaccaaatttacatcggattcaagcctaagaactttgaaatttctaaaatccaccaaagatgccgaaactatccaaaacaactccgattgacctgaaattttgcagacatatccaaaataatattacgaacctgttccaactgtcagaattccattctgacctcgatagcctattttccactgccgaccggaaatcgccaaaaactaactttcgccaattcaagcctaattctacatcggatatcacaaaattattctgaacacattcctaagtcccaaataacctaacaaagctatttgaaccataaaatccgcgttctgaggtcgtttaccaataagtcaactctcggttgacttttctcatcttaaggccatttttaaggactaagtgactaaatcatcactgcaaccattccgattccaagcctactaacactcacacatcaataacaatatatccaatccataacaagtcaataacaagaattttaatgcaagttttacgtaacgacagaccagatcgttacaatgtagtatcagccgccttttccatgcctcaactataaccaactctcaaataattttcaagttttcaaactttaactttacataaaaatagtgccaaaaatacgaaaatagtaaaaataagatagtaaattttcaaatctttgtttttctttgaaaatcagtaaaaatataaatgtcctcccttatagctccttgttgcggcgtgcaacccgctcccacctgtccacccttattgctcatccctaaatatatcacatttattgctcctgttgcggcgtgcaatccgatcccacatgtccacccttatcactccttgttgcggcgcgcaaccctctcccaccagacatatcatatcagtttattcataaatttcataactcaagccaagccttccacattacttttatttccacaatttcaaacagaaaaccgtatagctcgtaagctttaaccaatatcatttcataataaaaccaaccagaatatatgtaaacaccgtaacactgtcaacccaactcagtctttatataccatgatagaatcaagagaacagtcaacacttttaacacatttacaacaacaattggaaataaatcaatgaaacccaataaccatgtgaacctcaacaattatgaaacagttaaattgcatttctcacaacttcctaaaaacaaaccaacaggaacgtaaatataaatatatatatatatatatatatatatatatatatatatacacacctcgtaaaaacaatgtcacatcggtcaaccgttttgtaccacaagggcaccagctaaacaaccaatactctttccaaaataaccaccacaatatttaacaacaaataacaatgccaagtagtcatagaaacaataatgaacatagaaacaataatgaacatagaacaattaagacaagaatcaactaagttggaaacgggaaagggatcatgcttaacaaacaatttggtggtgcatagatactcgtcacctcacctatacaccacacatatgcatttcacatagcaaacaagtggggactcctatttcctcaggtcaaggttagaccaaacacttacctcaaatttgtaggtcacttactgctcaattaccactttttctttagaatttgcctctaacccgctcaaattagaaaaatctcctactggttgaactcagattttcctgtgaaaataaaaatagtgactccaatattttctccgaaacagaataatatgaaaggactcgctcaaaggattcgggttatgaaaatatacaaatactaattacaaactcggtccatctttggaattcatgtaatagatctcgggaaagaattgatgttacgaagaaaaattactctaaggaaaagacgcctcaatgttttctgcagaaaggtcacccgagaaaaccttcatatgataagagacggtcaaggtgttcttatctatatcgaagtggtttggtgttagaactttcgtaagagtactaatttcatatcgctaaaaaaacattcacaatttcatggtaaatttttttaggcaaattaatcaatttttttatttcattaataatccaacaaaataatttctttcaaaaattgatttctaaagtttgggacctcagaattcaatttcgggcatacgcccaagtctcatattttactgtagacctcccgggatcgtcgaaacacatatccgagtctgtttactcaaaatgttgactcaagtcaactaaaaccaattttttttattctaaaaccaattttttttattctaaaaattattatttcttatattttcacataaaaactttccggtttcacgtccgaattgcgcacgtaaatcgaggtagttaaaattaatctctttatgtctaataagcctaaaacggagtctaaattcataaaatgaccccttgggtcatctcaatttatgatgatatgagtttttatatcaataaacatccactttattgtggtattttttttatttgtgttgtacaaactgaagaataaagaggataactttaacatacatattaccccactacaagttttagtaatagaaccaacgcttttgcggatactttagaaactcaataagtctttttgagacttactacaacacaatatcccattgataatcaattttatttctccaaagtcgtatacttggctcttctagagctttcaattattttgtactaccacttattcatcgacatctatatgatgaataaacttttaaggagaaagttataccattatggtcatggtcaaaactatatgcaagatctattttttgcattaccgatgtctttaataatcacattgccaaaatatttggcataatcacaataggtacgtgatcaatgaccattcatgccataataatgacattattttcctatatcatctcaaacctccttttagaggtgagtgtggtatattcatgtaacgacccggtctgtcgttacgtaaaacctgcattttaactgttgttagtggcttagtatatgttggttattctattattaatgtgttagagttgataggcttgaaatcaaaatggttaaatgagaatttagtcacttagtccttaagaacagccttaaaatgggaaaagtcaactaagagttgacttattggtaaacgacatcggaatacgtattttatggttcggatagcttcgttaggtgatttgggacttaggagtgtgttcagaatatttttaggatgcccgatgtagaattaggcttgaattggcgaagttagtattttggcgaattccggttgataggcgagattttgatccgagggtcggaatgggattccgagagttgatgtagcttctttaggtcattttggacttgcacgcaaaatttcaggtcattcgaaaatgatttggttgggtttttgatcaaatgcgcgtttcagaagtttttggaaatcataggcttgaatccgatgtaattttggtgttttgatgttagttttgatgtttttagagtgcgaataagtttgaatgatgttatgggatatgttggtaagtttggttggggtcccgaggggctcgggattgatttcgggtgattaaaggactcatttggacttagaacaattgctggttttctggtttttctgcacagtgattttgttcactgcgattgcgggtgaagaaatgcgatcgcatagagttaatatggtcaggctcagatttgttctatgcgatcgcatgaagggaggtgcgatcgcagagtagagggaggacaagtcagtgcgatcgcgtggaaaaggctgcgatcgcacagaggaagatacgcgcgtgtggttggctggcaattgcactgtgcgatcgcgtgcatagtgctgcgatcgcggaggtctgggaaattggtcagtgcgatcgcaggggaaaggctgcgatcgcacagaataaatacctgggcagttaattaaaaagcccttccgcgacttaaaccctcttttacaccattgttgagcggaggagagctttttgggcgattcttgaaggagagaatcattgggtatcacagaggtaagtattttgatcattaaaactcgtttatgggtgattatagaccataatcccagcctttaattcatgaaaaatagtagaaaaataggattttggggcatgggattataagaccttcaaggggcgatttgaggggtcatacggactccgattttggtgttctttatatgtacggactcgtgggaagatgaagaacacttttctataaaaagttctgagtcttggaacgcgggcccgggggtcggattttgaccgaattcggatttttgagtaaatttgatacctttcgattggaaattattccttaagcccatattgatgataaaaatctgaacttggtagatttggagccttcagaggttgattcgagaggcaagcgcattgcggagtagtttcgggctagttttgaggtaagtaatgtctttaaatcctgtcctgagggtatgaaaccctggactatgcaccctttcacggggtttgaaatgaaaaggtggaaactttggaacatgcttcctatttaggcgactattgagttgcgaaaccgatttttaagcctttgcttaaatagtatttatacattatgatatgttttgggctgtaagccatgtttggggcctcgtgccgatttgtttaccccttgggggatgtttttactattttcctcactactatattatgattattcactcagtcgtttctgtgaaattgttttgacactcagagtattttgatactacttcttgaaaatgaaatactgtttttgggtcgagaacccggtatatttatggcctgaagggcaaattgagagtgtctgactgagtgaggctgctggcctatattgtgaggattatgtgatatgagtgaggctgcgggcctatattgtgtgtgaattatgccatgttgtggcttattattgcgcttcggctgtaggatcccctccggagtctgtaacacacccccagtgagcgccggtaccgaatgagtgatgcccgcggggcttatgaagagtgactgtgaggatgcctgatgggcagagtgattgtgaggatgcctgatgggcagagtgattgtgaggatgcctgatgggcagagtgattgtgaggatgcctgatgggcaatggttacgataaataattttggcccgaggggcagttttatgaaagattttactgagttttcaaactatgatttacttcgttttcacactggttttactgagatatactgatattgcacttgtttcgaaggtttttctgaaaactgatttcgaactcattatttgatgaatactacgtggtgacttggtgttttactggtttgtggaattgtgtacatgttctgtgtgtttatattactcagactgtgatttattttcattactactgagttggcgtactcttaaagactccctgtgcctctgtgcacagatccaggtactagtttgcagcagtagctgacgcagttgatagcagcattccacgggatttcgaggtagctgtccagcgtccacaacttctccattttccttccttatttagtcttagcatttgattcagagacatatattatagttttagagagttagtttatttattcttagatgctcatgactattgactccagttcttgggaggttgtttaggttaatatgggaacgttaatactttattatattaattatgatgtggttgcttgcttattatttaattgtgaactattataattgaacaaaaagcgcagtaaggtgatggttggctagcctaattccacgataggcgccatcacgacctgttaggatttggggtcgtgacaagttggtatcagagcactaggttgcataggactcaaaggtcatgagcaggtttagtagagtcttgcggatcggtacggagcgtctgtacttatcttcgagaggctgcagaacttttaggaaacatctctattttcttgaactctttcgtgccaatttattgattctcgcaatctaaacttacgttgtttcattctctcacagatggtgaggacacgcaataccgatcagggtaaccaggcaccagccagacccacaaggggtcgaggccgtggtagaggtaggggactagctcaggaagcagccggggtggtaccacaggatccccctactgtccaagatcaggttcccgccgatggtgctccagcgggacaggctcaggcaccgacaatgcctattgttattccgggtcttcaagagaccttggctcagatattgacggcgtgttccagtttggctcaggcagttgctatgtctaatacggccactgcagctcaggccgggggaggcaatcagactctagctgcccggacacctgagcaggttgtacggggtattcaggcaccaggagcagccccagttcagccggttgttcccgctcaggattttgtggtcgctgttatgcctgaggatgagcagcgtaggttggaaaggttcagcagacttaagcctccgactttcagcggtacagagggtgaggatgcccaaggttttcttgataaatgccagaggatactacgtactgcgggtattttggagaccagtggagtctcgtttgttacatttcagtttgcgggtgctgcttttacttggtgggaatcatttgagaggcgtaggccggttgattcagcacctctcacctggcagcagttctccacgatctttttggagaaatatgttcctcagtcccacagagaggagcaacgtaggcagtttgagcagctgcgccagggagaattatcagtcacccagtacgagatgagattttctgagttagccagacatgcgtctgagattgtccctactgacagggagaggatcaggaggtttgtagatggtctctcgtatcagcttcggattttgatgaccagagagagggtgtctggagttacatttgagcaggttgttgatattgctcgggatattgagtcggttcgtaggcaggatcgtgaggaaagagaggttaagaggcctcggggatcaggaaatttcagtggtgccccttccagagggcaatttcagcccaacagaggtcgttcattcagacctccacagtcagttcgcccaacatacaatggggtatcgtcggggcagggtcctcgcaatgctcatcagggacgttcatcttttagtgcccttccagctcagagctccgcccgagcgtcgtcttatcagggttcgtctggtggttatcagggtggcagaggttgccgtcagttttcatctccgactccaggtaattgttatgagtgtggagagttcggacatgagtggaggcagtgtccccgtcgtcctaatagtttagctcagcagagggttcatccctcggcttcagccccaattatttcaccacctacccaggccgctaggggtggtggtcaggcagctagaggccgtcctagagggggaggtcgagcaggtggaggtcagccacgtatttatgcacttccggctaggcctgatgctatggcgtcagatgcagtgattacaggtactattttagtttgtcacagtgatgatttggctttatttgaccctggttccacgtactcttatgtctcatcctattttgctcattttctgaatatgccccgtgagtctcttattacttctgttcatgtttcgactctggtgggtgatactattgttgtggaccgtgtgtatcagcagtgtcttatatctattgggggtctagagacccgagtagacttgatgttactgagtatggtcgattttgatgtaattctaggcatggattggttatctccatgtcatgctattcttgattgtcacgctaagaccgttaccttagctatgcccggagtttcgagagttgagtggagggggtttataaagcatgtgcctagcagagtgatttcttatttaaaggctcaacgtatggttgagaaagggtgtgaatcttatcttgcgtttgtgagggatgttagtagtgagactccgtttgtggattctgttcccgtagtccgtaattttccggatgtattccctgcagacctgccaggcatgccacctgactgggatattgattttggtattgacctggtgccagatactcatcctatctctattcccccttaccgtatggcaccagcagagttgaaagaattaaaagaggagcttcaggaactcttagataaggggttcattcggcctagcgtatcgccttggggtgcgtcggtgttgtttgtgaaaaagaaggatggttcgatgcgcatgtgtattgattatagacagttgaataaggttacggtgaagaatcgctatccgttgcctcgtattgacgacttatttgatcagcttcagggagctaaggtattctctaagatcgatttgaggttggggtatcatcagctaaagattcgggattctgatattccgaaaacggctttcaggaccagatacggtcattatgagtttttggttatgtcatttgggctgaccaatgccccagcagcgttcatgcaattgatgaatagcatatttcagccctatcttaatactttcattatcgtattcattgatgacatcctggtctattctcgtagccaggaagagcatgctcaacacttgagaatcgtgttgcagagattgagagaggagaaactttatgcaaaattctctaagtgtgagttttggcttggttcaatagctttcttggggcacgtggtgtccagtgagggtattcaggttgatccgaagaagattgaggcggtgcaaagttggccaagaccgtcttcagctacagagattcggagttttcttggtctggcgggttactaccgtcgctttgtggaaggattttcttctattgcttcacctctgaccaaattgacacagaagggtgttttattcagatggtccgacgaatgtgaggagagctttcagaagctcaagtcagctttgaccacagctccggtattagtgttgcctactggttcgggttcttatacggtttattgtgatgcttctagagtgggattgggagtggtgttgatgcaggacggtagggtgatcgcctacgcgtcgaggtagttgaaggtgcacgagaagaattacccagtgcacgatcttgagttagctgccattgttcatgccttaaagatttggcaacattatttgtatggagtgcagtgcgagattttcaccgatcatcgtagcttgcagtatctgctaaggcagaaagatttgaatttgcgacagaggagatggttggagcttctcaagtattatgatttaactatcttgtatcatccgggcaaggccaatgtggtggccgatgccttgagtcgcagagccgagagtttgggaagtctagcttatctctcagcagcagagcgacccttaccccttgatgttcaggccttagcgggtcagttagtgagattggatttgtcagaccctccacgggtggtagctagcatggcttctcggtcttctttatttgatcagattaaggcgagacaatatgatgaccgacatttattagttcttcaggatagagttcgtcggagtgattccagagacgtaactattggtgatgatggagttatgaggatgcagggccgtatttgcgtgcccaacgtggatggtattcgagagttgatattagcagaggcccatagttcgcggtattctatacatccgggtgccgcgaagatgtatcaggatctgaaacagcagtattggtggagacggatgaagagagatattgttgagtatgtagcacggtgtctcaactgccagcaggttaagtatgagcaccagagaccaggtggtttgcttcagaggttagatattacagagtggaaatgggaaaggattactatggactttgtagttgggcttccacggacttcaaagggttttgaggctatttgggtcattgtggatagattgaccaagtccgcgcatttcattcctgtcagtactacctatacttccgagcggttagctggtatttacattaaagagattgtccggttgcatggagttccggtttctattatttctgacagaggtactcagttcacatctcagttttggagagctgtacagaagggtatgggtaccgatgtagagttgagcactgcatttcaccctcagaccgacgggcagtcagaacggactattcagatattggaagatatgttacgggcttgtgtgattgattttggtggttcatgggatcagtttctgccattagcggagtttgcatataataacagcaatcagtccaatattcagatggccccgtacgaggccttatatggtaggaggtgtagatctctggttggctggttcgagcctgatgaggctaagttgttgggcacggatttgattcaggatgcgttggagaaggtgaagttgattcaggagagacttcgcacggcgcagtctagacagaagagttatgcggaccagaaggttcgggatgtatcatttatggaaggtgagaaggtactgctaaaagtatcacccatgaaaggtgttatgaggttcggaaagagaggaaagttgagtcctcagtttattggtccttttgaggtgctttagaaggttggagaggtggcttatagacttgctttgccacccagcttgtcgagtgttcatccggtgtttcatgtgtcgatgctcaggaaatatgttggtgatccgtctcatgtgttagacttcagcacagttcagctcgagggtgatatgtcatacgaggttgagccagtagctattttagctcgtgaggtcagaaagctgagatctaaggagataacatcagtgaaggtgcagtggagaagtcagccagtggaggaagctacttgggagaccgagcgggaaattcagagcaagtatcctcacttgtttgagaccccaggtatgtttttagactcgttcgaggacgaacgtttgtttaagagggggagaatgtaacgacccggtctgtcgttacgtaaaacctacattttaactgttgttagtggcttagtatatgttggttattctattattaatgtgttagagttgataggcttgaaatcaaaatggttaaatgagaatttagtcacttagtccttaagaacaaccttaaaatgggaaaagtcaactaagagttgacttattggtaaacgacatcgaaatacgtattttatggttcggatagcttcgttaggtgatttgggacttaggagtgtgttcagaatatttttaggatgcccgatgtagaattatgcttgaattggcgaagttggtattttggcgaattccggttgataggcgagattttgattcgagggtcggaatgggattccgagagttgctgtagcttcgttaggtcattttggactttcccgcaaaatttcaggtcattcggaaatgatttggttgggtttttgatcaaatgcgcgtttcggaagtttttggaaatcataggcttgaatccgatgtaattttggtgttttgatgttagttttgatgtttttagagtgaaaataagtttgaatgatgttatgggatatgttggtaagtttggttggggtcccgaggggctcgggattgatttcgggtgattaatggactcatttggacttagaacaattgctggttttctggtttttctgcacagtgattttgttcactgcgatcgcatagagttaatatggtcaggctcagatttgttctatgcgatcgcatgaagggaggtgcgatcgcagagtagagggaggacaagtcagtgcgatcgcgtggaaaaggctgcgatcgcacagaggaagatatgcgtgtgtggttggctggcaattgcactgtgcgatcgcgtgcatagtgctgcgatcgcggaggtctgggaaattggtcagtgcgatcgcaggggaaaggctgcgatcgcagagaataaatacctgagcagttaattaaaaagcccttccgcgacttaaaccctcttttacaccattgttgagcggaggagagcttttgggcgattcttgaaggagaaaatcattgggtatcacagaggtaagtattttgatcattaaaactcatttatgggtgattatagaccataatcccagcctttaattcatgaaaaacagtagaaaaataagattttggggcatgggattataagaccttcaaggggcgatttgaggggtcatacggactccgattttggtgttctttatatgtacggactcgtgggaagatgaagaacacttttttgtaaaaagttctgagttttgggacgcgggcccgggggtcgggttttgaccgaattcggatttttgagtaaatttgatacctttcgattggaaattattccttaagcccatatagatgataaaaatctgaacttggtagatttggagccttcggaggttgattcgagaggcaagcgcattgcggagtagtttcgggctagttttgaggtaagtaatgtctttaaatcctgttatgagggtatgaaaccctggactatgcaccctttcacgggttttgaaatgaaaaggtggaaactttggaacatgcttcctatttaggcgactattgagttgcgaaaccgatttttaagcctttgcttaaatagtatttatacattatgatatgttttgggctgtaagccatgtttggggcctcatgccaatttgtttaccccttggggaatgtttttactattttcctcactactatcttatgattattcactcagtcgtttctgtgaaattgttttgacactcagagtattttgatactacttcttgaaaatgaaatactgtttttgggtcgagaacccggtatatttatggcctgaagggcaaattgagagtgtctgactgagtgaggctgctggcctatattgtgaggatgatgtgatatgagtgaggctgcgggcctatattgtgtgtgaattatgccatgctgtgacttattattgcgcctgggctgtaggagcccttccggagtctgtaacacacccccagtgagcactggtaccgaatgagtgatgcccgcggggcttatgaagagtgactgtgaggatgcctgatgggcagagtgattgtgaggatgcctgatgggcagagtgattgtgaggatgcctgatgggcagagtgattgtgaggatgcctgatgggcaatggttacgataaatgattttggcccgaggggcagttttatgaaagattttactgagttttcaaactatgatttacttcgttttcacactggttttactgagatatactgatattgcacttgtttcgaaggtttttctgaaaactgatttcgaactcattatttgatgaatactacgtggtgacttggtgttttactgctttgtagagttgtgtacatgttctgtgtgtttatattactcagactgtgatttattttcattactactgagttggcgtactcataaagactccctgtgcctatgtgcacagatccaggtactagttcgcagcagtagctgacgcagttgatagcagcattccacgggatttcgaggtagttgtccagcgttcacaacttctccattttccttccttatttagtcttagcattttcagagacatatattatagttttagcagagttagtttatttattcttagatgctcatgactattgactccaattcttgggaggttgtttaggttaatatgtgaacgctaatactttattatattaattatgatgtggttgcttgcttattatttaattgtgaactattataattgaacaaaaagtgcagtaaggtgatggttggctagcctaattccacgataggtgccatcacgacctgttaggatttggggtcgtgacaattcactaccactagcacgttcatattctttcgagaatgaatatgtattcataaatcagattttgtcacattctcatcatgaatggaccataatcatctatatgtgctttacaaaatctcatgtcaaatcgatgacaaatattactttcaaagagtgaaagattattttgagaattcttattattctcattctcacgaatatgacgattataatttcgtctattgccacgtcgacatccattgataccttcatggtaataatttgtcttctttcagacttatcacatattgttatcacattctcttaaggggaatgagaataaagcaaattcaatgggacgtgtttccacttttttgcccacaatcatacatgaatttgatcatggcaagacatagaaattttaccactttggtggttataatttcttgtaaactctataggagttataatcaaagtttattatttttgcttgcatttaaaatcaaattatagaatttcacgaatttaaaagagaaaaataaagtaaaatacttaccttaaatccagaatttaatcatgaagaaagttcatggagaattgacaatcattatgctcagtcacaaaacttctactcaattgattagagtctcgtgccgataacgtgttatgaaacaataaaagaagaagaataatattgcagagaaagagagagatatgaaattcttattgaatttgggatgatttacaatggggtaagacctctctatttacaggaaaatagtgacttagccaccaagtaacaaaccctaaaatctctctaaaatatagacattcaccataaatagaattctatttataagagaaaaataaatatttttacaaaacttttactccctacgtcctattttaggtgaacatttactatttgaaaagtcaaaaaaagtttttgtaccatgactttttattttaaatattttaaattattgattattgtaacttataatcgtttttataatttttaaacatataagttttattttaacaatttttaaaattctatgtttgaatttacgtaatttgacggtcctacactaaatcgtttcatataaaatggaacgatggagtaattcaaaatcaatgcatttatgaaattatttatattttaactcatagtaagttgtaagatttaaaatatacaatataagttttttctatttaagcaaaaaagcataaaattttgaataattccaattatttatttaaataaataatagaatatttattataattagagtaaagtctgtaattgaaacatgaaaaaatgataaaattgtaaaaattggaagaaaattaataatattttctttgcctcagcttgtttggatggttgttacctattatattgtatcgtgttgttactttaagcgaaattattagttatgtcagcccataagcaaattaatgcaaaaattttaattcataaaatattaccaatgttagccaaatgctaccaatattagccaattagctatttgtagctaaaaaagtcgaaattttgctttcttttgaatgtgttttattggaatagattgggtacatcttagtaagttcgaaccttagttttgcgacgatttgatggagttttgaggtagtttgaattgaaaattcaaattaaaaaatgaacataaagaagactatatgtgccacactgtgtgtatcatttctatattacataaatatcgtatgcgtattaaatatgtatcacatgtattataacgacctggtcggtcgttacatagaacctgcattatatttacttctattgccttgtcgtatcttggttatactgttcatgatgtgttagagttggttagctcgggttcggagtggttatagaaggaattgaggcatttagtctctaaaagtagccttaaagttgaaaaagtcaaccgagagttgatttattggtaaacaacttcggaatgcgaattttatggctcgaatagcttcgttaggtgatttgggacttatgagtgtgtccggaataattttgtgatgttcgatgtagaattatgcttgaattggcgaaagttagtttttggtgatttccggtggacaatgaaaaataggatatcgtggtcggaatggaattctgacagttagaacaggttcataatgtcattttggatatgtctgcaatatttcaggtcaatcggagttgttttggatagtttcggcatcgttggtggattttagaaatttcaaagctcttagacttgaatccgacgtgaatttggtgtttagatgttatttttggtgttccgagagtgcaactaagtttgaattatcatttatgatgtgttggtaaacttggttggggtcccgaggggctcgggattgatttcggatggttagcgggcattttggctttggaaaagtctgatgtttttctggtgttagcacaacaacattttgtgcatcgcgatcgcgaggtcaggtccgcgatcgcgtaaggtggagtgagtccaggaggaaattgctcagtgctgtaacgacctgaccggtcgttttgagagttagcgccccgttcccctgataattgttcctcctatgtcttattaggttaatggaactttttggagcgttgagcggtgaaatttggagtgattttggtcatatagtcctttaaggtgaatttcagctttagaaattgaaccgtagctagagctgtgtgaagacggatccggaatggaatttcgtcgactccattagctccgttgagtgatttcggggttaggagcgtgttcggaatatgttttcgaggtcggatgtagatttagacttgaattggcgaaagttagaattttggcgatttcggtcgataggtgagattttgatatcggactcggaatggaatttcgaaagcgacagcaggtccggaatgtcatttatgacctgtgtgaagaatttgaggtcattcggatgagtttagacatgtttcaacgtcgaatgtgaattcttgaaaatttccaagtttttagggttgaatctatgcatatttgagtattttgatgttatgggacgtgtttttaaggctcgaacaagttcgaataaggtatttgggttagttggtaggtttgattgaggtcccggggccctcagatgattttcggatgctcaacggagtggttttggatttagtaaaacaccagaaattttgctgctggtttccttctatgcgttcgcgtagaggtcaccgcgttcgcatagaatagttttggggcttcagtgttttcttcttcacgtccgcgatcaactggatgcgaacgcataggttgggcaggatactcttcgcgaacgcattgagtacttcgcgtttgcataggcttagaggggggggggggtcccaggggtcaggggcagttactcatcgcgttcgcatgtaggggaccgcgttcgcgtagtgtccgtgggcctgttctccgctttcgcatgtcctgtgccgcgttcgcgaaggccaattctgggcccagtgaattttactcttcgcgttcgcggtggcccgtccgcgaacgcatagaacaaatatctgggcagaatactaaaaccccaattcgaagctctaagcctattttcaccatttttgaattgtgggagctcgggagaggcgatctttgagggatttttcacctgggtattcttggtaagtgatttctaaccatcataggttaagttccatgattctaatcctaaattccacccttaatttcgagatttttgagtagaaacttgggaaaaatgaagaaacttcttagaccgaattttgggtttttgattgagtatttgacctccgaattgagagattcttatatggttagactcgtgggggaatgatggttcgggaaacgtaaattttacccgattccgagacgtgagcccgaggggcattttggtcaaaattcctaatttcgcgtattagcttcgaattaattagttactttgattcttgaaatgatatttacaatatgcaatcgaattgaatagatttgggccacctggagttggatactcgtggcaagagagtggtacaaagttgatttacgtagtcgaggtaagtggcttgcctaactctgtgttggggaatctcccttaggcatttttactggttcttcctataaaaatcccgtgtacgtgaggtgacgagcgcgtgcacgggatattttcactttctttctacataatgtttccttttcaactctattattactgttatcatttaaattgcataataacttaaggtttatcatggtaaattgatttctaactgattttccaatcgttactattctttgaaattgatttaatgattttcttcgagatttccaattggttttcctcaaacccttaaactaggttattttggagatttactttatattacgtataaatatagggattgcgggcatagacatgagcctttccctcattttgcattgcatacagggattgagggtatagacctgagcctttccctcattttgcattgcatacaggtattgtgggtatagacctgagcctttccctcattttgcattgcatacagggattgcgggcatagacctgagcctttctctcattttgcattgcatacagggattgcgggcataaacctgagcctttcctcattctgcattgcatacagggattgcaggcatagacctgagccttttcctcatattgcattgcatacatagggattgcgggcaaagacctgagcctttccctcatattgcattacattgtacctttactttcttacagagctttatatatatattgcgttgatccgagcatttgattataccgtttcttgctagcctttacttataattcctgtcgattattacctgctttacttacttgttctctatatctgttactttgcaaacctcagtagggcctctacctgacctcatcactacttgactcgggttaggcttggcacttactgggtaccgaatgtggagtactcacacccttctgcgcatgttttccccatgtgcagatccaggtcctagtacgcggtatctcagctagccagcatcagcaaaatcaggagactcgaggtataatctgcagcgtccgcagatcttcgagtccccttcctatcttgaagttgtagtacttgtagatgaaactatacggtcttttctatccagtggtacatattgagcagtagagtagcttgtgatgtattgtgatattccgggttttgggtaaagtaactgttcatgccgagcggcgtcgactttactatgatttatttcacttactgttattttacctgttttatctaaatttcgcttaaggtataggcttacctagtcgtctagactaggtgccgtcacgagacccagtcggagggagaattgggtcgtgacaagttggtatcagagcgtctaggttcataggagtcacaacatcacaagccagtttattagagtctcgcggatcggcgcggagacgtccatacttatcttcgagaggctatgtaactgttaagaaagatcatacttcttggaatcccttctcgtgctaattattactaccaaaattcttaaatgttattctattctttcttacagatggttcgcactcgcaccagacgtaccgacgatcaggcacccgagcccccagccagagccactagaggcaggggtcggggcagaggacgagcacgcggtgcaacccgagcaccggctagagcagtgacggaggatcccccagcgactgcagttgaaggggaaccggaggtccctactatcactccagccctccaggagactttggcccagttcatgagtgctttcagtaatctgtctcaggcgggactacttccgctaaccccggctacatcccaggccgagggaggggcacaaactctcgcagcccgtactcctgagcagagggttcacatggggcaggtcccagagtatattcctatgcctccagcagctccagttcagcctgaggccagagcagctgcatctgagtctgagcagctccgtcttgagaggtacaagaagtaccacccacctgagttcagcagtttagcttcagatgacgctctgggttttcttgaggagtgtcatcgcatccttcgtaccatgggtattgtggagacgagtggggtctctttcactacttttcagctgagaggagcagcctatcaatggtggcgtgcatttgagcttagtagtccggacggggcagcctcacttactttggctcaggtttcagagatgtttctacttgagttcgtccctcagagtctcagggatgcttggcgtgcggattttgagcatcttcgccagggtactatgaccgtgtcagaatatgcggtctggtttagtgacttggcacgacatgcatcagctttggtatctactgtcagagagagcgtttgccgttttattgagggactccatcctagcattcgtaccagtatggccagggagttggagactgatatcacttactagcgggccgtgagcattgctaggaggattgagagtatgctgacccgggacagagagaagagagaggccaagaggtctcgagagacgggtcatttctcaggagctcgcgcgccagcaacacgctatggtaggggttttgtgagtcgcccagtacattcagctcttccagcagccagtgatattccagcacctcctagatctcgggagccttattatgcaccaccagtatctcaggcgcctcctgctcgaggttctaccaccggccagtccagcatgccagttcagagtcagcagccacgccctcagaggggttgttttggatgtggtgaccctcgtcatgtgatcaaggattgccctagagttaggaggggtgcaccaccagagacttatcaggtaccacgtctgccacccggtcccccaaccatacttccagccccagctgctgccccaccatctcaggcagctcgaggtggaggccggggaggacgaggtcgtcttagagggggaggtcaggccaggtactatgctcttccagctcgatccgaggccattgcttcagactcagttatcacaggtattgttcccgtttgtcatagggatgcatcagtattattcgatccaggttccatatattcatatgtatcatcttatttcgcctctcatttggggatatctcgggattctttgagttcccccatatatgtttctactcctatgggagattctcttgttttggaccgcatatatcggtcgtgtttgatttctatcagtggttttgagaccagggctgatttattattactcagtatggtagatttcgatgttattttgggcatggactggttgtcgccccactatgctattctttattgtcacgccaagaccgtgacgctggctatgccaagattaccgaggttagagttgaggggttcgctagagtatactcctcgtcgagtcattttttttcttaaggctcagcggatggttgcaaaggggtgtgatgcttatttggcctatgtgagagatgttagtgccgaaacccctacagttgattcagtcccagttgtgagggattatcacgatgtttttccagctgaccttccaggtatgccgcccgacagagacattgactttagcattgatttattgcctggcactcagcctatttccattcctccctattgcatggctcctcctgagttgaaggagttgaaggaacagttgcaggaactgcttgataaggggttcatcaggcccagtgtatcgccttggggtgctccggtgttgtttgtgaaaaagaaggatagatcgatgcgtatgtgcattgactacaggcagttgaataaggttacaacgaagaataggtacccgttacctcgcattgatgatttgtttgaccacctacaaggtgacaaggtattctccaagattgaccttcgttcgggatatcatcagctaaagattcgggagtcggatatcccgaagactgctttcaggactagatatggtcactacgagttccttgttatgtcatttgggctgactaatgccccaacagccttcatgcacctaatgcacaacgtatttcggcctcatcttgatactttagtcattgtgttcattgacgacattctggtatattctcggtcctaggaggaccacgagcagcacttgaggaccgtgcttcagaccttgagagagaagaagttatatgccaaattctctaagtgtgaattttggcttgattctgtggcattcttaggccatatagtatcttcggatgggatcaaggtagatccgaagaaggtggaggcagtgcagagttggcccaggccgtcttcagctaccgagatccgcaatttcctcggtttggctggttattatcgccatttcgtggagggattttcatccatttcagcacccatgactagattgacccagaagggtgcacgttttatatggactgaggagtgtgaggggagctttcagaagctcaagacagccctgactacagctccagtgttagtcctacctaccggttcggggtcctatacaatttattgtgatgcttcgaggattagtttgggggcggtgttgatgcaggacggtagggtgattgcctacgcgtctagacagttgaaggtacatgagaaaaattacccggttcatgatcttgagttggcagcgattgttcacgccctgaagatatggcgtcattatatatacggtgttccctgtgagatatatacggatcaccggagtttgcagcacatattcaggcagaaggatctcaatttgcgtcagcgcaggtggttggagttactcaaggattatgacatcaccatattataccatccggggaaggccaatgtggtggccgattccctgagtcgccgggcggagagtttgggtagtttggcatatcttcacgccgctgagaggcccttagctttggatgttcagtccttagccaaccaattcgtgaggttggacctttttgagcctcaccgggttttcgcttgtgttgttgctcgatcttctctttatgactgcattcgagagtgccagtatgatgatcccgacctttgagctcttcggtatagagttcaacgggatggtgttagagatatgaccatagatgatggtggtgtgttgagactgcagggccgtatttgtgtgcctgacgtagatgtactgcggagtttgatccttgaggagacccatagctcgcgatactccattcatcccggcaccgcgaagatgtaccaggatccgagacaacactactggtggcggaggatgaaaaaggatatagtggagttcgtagccaaatgcctcaattgtcagcaggtcaagtgtgagcatcagagaccgggaggattacttcagcagatgaggcttccagagtagaaatgggagcggattaccatggattttgtggtcgtacttcctcggactctgaggaagtatgatgctatttgggtgattgtggatcggctgaccaagtcagcttatttcattccggtattgactacatattcttcgtagatagtccggttgcatggtgtgccggtatctattatttcagaccgaggtcctcagttcacctcgcacttctggagagccttacatagtgagttgggtactcagattgatctcagtacaacattccactctcagacggacggagagtccgagtgcaccattcagattttggaggatatgctccgtgattgtgtgattgattttggaggatcatgggatcagtacttacctcttgcagagtttgcttataataacatctatcagtccagaatttagatggcgccgtttgaggctttatatggtaggcggtgcaggtctccagttggatggttcgagccgggcgaggcccgattgttgggtacggatttggtttaggatgccttggacaaggtgaaggtgattcaggatagacttcgcacagcccaatccagacagaagagttatgcggaccgaagagttcgtgatttatcattcatggctggtgatcgggttttgcttcgggtatcgccgatgaagggcgtcatgagatttgggaagaagggtaagctgagtccgaggttcatcgacccttttgagatattgcagcgggttggggaggtcgcttatgagttggccttgcctcccaacctagcaggtgttcatccggtattccacgtgtccatgctccggaagtatcatggtgacccgactcatgttttggatttcggctcagttcaattagacaaggatctatcatatgttgaggaaccagtggccattttggacaggcaggtcagaaagctcaggtcgaaggacattgcttcagtcaaggtgcattggaggggtcatccggtcgaggaggagacttgggagaccgagcaagatatgggtagtcagtaccctcacctattcacagcttcaggtatgtttctatactcgttcgaggacgaacaattttcttaagagggggagaatgtaacgacctgaccggtcgttttgagagttagcgcctcgatatccttataattgttcctcctatgtcttattaggttaatggaacttgtcggagcgttgagcggtgaaattcggagtgattttggtcatatagtcctttaaggtgaatttcagctttagaaattgagtcatagctagagctgtgtgaagacggatccggaatggaattccgtcgactccattagctccgttgagtgattttggggttaggagcgtgttcggaatatgttttcgaggtcagatgtagatttaggcttgaattggcgaaaattagaatttcggcgattttggccgataggtgagattctgatatcggactcggaatggaattccgaaagagacagcaggttcagaatctcatttatgacctgtgtgaaaaatttgaggtcattcggatgagtttagacgtgtttcagcgtcgaatgtgaattcttgaaaatttctaagttcttaggcttgaatctatgcatatttgagtattttgatgttatgggacgtgttttaaaggctcgaccaagttcgaataaggtatttggattagttggtaggtttgattgaggtcccggatccctcggatgattttcggatgctcaacgaagtggttttggatttagtaaaacaccagaaattttgctgctggtttccttctatgcgttcgcgtagaggtcaccgcattcgcatagaatagttttggggcttcagtgttttcttcttcgcgtccgcggtcaactggacgcgaacgcataggttgggcaggaaactcttcgcgaacgcattgagttcttcgcgtttgcataggcttagaggggggtgggtcccaggggtcaggtgtagttactcatcgcgttcgcaggtaggggaccgtgttcgcgtagtgtccgtgggcttgttctccgcgttcgcatgtcctgtgtcacgttcgcgtaggccaattctgggcccagtgaattttactcttcgcgttcgcggtggcccatccgtgaacgcatagaacaaatatctgggcagaatactaaaaccccaattcgaagctctaagcttatttttaccatttttgaattgtgggagctcgggagaggcgatctttgagggaattttcacctgggtattcttggtaagtgatttctaaccatcataggttaagttctatgattctaatcctaaattccatccttaatttcgagatttttgagtagaaacttgggaaaaatgaagaaacttcttagaccatattttgggttttttattgagtatttgacctccgaattgagagattcttatatggttagactagtgggggaatgagggttcgggaaacgtaaattttacctgatttcgagatgtgggcccgaggggcgttttggtcaaaattcctaatttcgcgtattagcttcgaattaattagttactttgattcttgaaatgatatgtacaatatgaaatcaaattgaatagatttgggccacctggagttggatactcgtggcaagagagtggtacagagttgatttacgcagtcgaggtaagtggcttgcctaactctgtgttggggaatctcccttaggcatttttactggttcttcctataaaaaccccgtgtagtgaggtgacgagcgcgtgcacgggatattttcactgaagttccttatttctttctacataacgtttccttttcaactctattatcaccgttatcatttaaattgcataataacttaaggtttatcatggtaaattgatttctaactgattttccaatcgttactattctttgaaactgatttaatgattttctttgagatttccaactggttttcctcaaacccttaaactaggttattttggagatttactttatattacgtataaatacagagattgcgagcatagacctgagcctttccctcattttgcattacatacagggattgtgggtataaacctgagcctttccctcatttttcattgcatacagggattgcgggtatagacctgagcctttacctcattttgcattgcatacagggattgcgggcatagacctgagcctttccctcattctgcattgcatagagggattgcgggcatagacttgagccttttcctcatactgcattgcatacatagggattgcggatagagacctgagcctttccctcatattgcattgcattgtacctttactttcttacagagctttatatatatattgcgttgatccgagcatttgattataccgtttcttgctagcctttacttataattcctgtcgattatcacctgctttacttacttgttctctatatctgttactttgcaaacctcagtagggcctctacctgacctcgtcactacttgactagggttaggcttggcacttactgggtaccgaatgtggagtactcacgcccttctacgcatgttttccccatgtgcagatccaggtcctagtacgcgatatctcagctagccagcagcagcagaatcaggagactcgaggtataatctgcagcatccgcagatctccgagtccccttcctatcttgaagttgtagtacttgtagataaaactatacaatcgtttctatccagttgtacatattgagcagtagagtagcttgtgatgtattgtgatattccgggttttgggtaaagtaactgttcatgccgagcggcgtcgactttactatgatttatttcacttactgttattttacctgttttatctaaatttcgcttaaggtataggcttacctagtcgtctagactaggtgccgtcacgagacccagtcggagggagaattgggtcgtgacaagtgcaatcgcaaaggtcgggctgcgatcgtgtagctttggaggttgttcaattgcgatcacgtgatgtcaggtcgcgatcgcgtagggttggcaggcctgagtctggggtcacgcgttgttcttcgcgaacacggttgatggttcgcgatcgcgttcattcaggtaataaggagccgcgatcgtgtgggctttattgcgatcacagagagtatatttgggaaactgaggattagtgcatcgcgatcgcagatcgcgatgtgggtcccgcgatcgcgatgtataaggacctgagcagtatttaaataaaccatccgcgaccattaaccccttttccaccatttttgaacgggaagaagcttttgaggcgatttttaagagagaaaatccttattcttcattgaggtaagtattttggatcctaaaactcgattatatgtgattaaggatcaaaataccagtatttaatttatgaaaatcagtagaaaaaggtggagttagagcttgagattatgagaccttttaaggacgatttgaggggtaaaacgaactccgattttagagttctttatatgtaaggactcgtgagatgatgaagaacaaattggtataaaatttgtcgagttccaagacgcgggcccgagggtcgggttttggctaattttgttttttgtgctaaaattgatattttttaattggaattcattcctttagcataatttgatgataaaaatattaacttggtagatttggagcactcggaagttgattcgagaggcaagcgggttacagagtaacttttcgggctagtttgaggtaagtaatgtctttaaatcctgtcctgaggatatgaaaccccggactttacatcctttcacggagatggagtgacgcacacactagatgatgagtgtggggcgtgcacggattggtaaattggaaaaatgtacctttttaggcaactattgagtcgctagactacttttaaagcttattctctatagtactactatgatttgatataattgggctgtaagccatgtttggggcctagtgccgacctattttaaccccttgggggttgttattactgtttcctcactttgaaactatgattttacactcagtctttcttgtgaaattgttaacactcttatttgataatataactatttcttgaaacgaaatactattttgggccgagaaccctgctttattcatggcccaagtggcatgctgagaatgtctgactgagtgaggccgagggccaatgttgtgaggatgttatgatacgagagaggccgagtgcctgagagtgatttatgccatgatgtggcttgtttatagcgcttgggctgtaggagcccctccggagtctgtacacacccccagtgagcgcaggtacctactgagtgcgagtgccgagtgatgagtgattgagaggcataagtgacagtgaggtttcccgcggggctgatactaagtgatggtgaggtgctgagggaaatgttatgagagatgaatatggcccgaggggcagttttactatgatattttactgagttttgactatgatttacttcattttttaaactgatatcactgagagttttattgataaatattggaaaatatatacttgtttcaaaggatttttatggaaactggttttcgaacttatgtattgatgtatactttgtggaattttggtattttactgttttgtggattggtgtatctgtgttgtgtgtttcttgttctcatactgtgatttatttcattactactgagttggtgtactcattattactacatgcacccctatgtgcagatccaggtactggttcagagcagtagtcgtccgagttcgttgtcatcagcttttgggatttcgaggtagctatccagcgaccacaacttctccatttcccttccttatttagttttagcatttcattcatagacattggttatgatattagcagagttatattttattattagatgctcgtgatcggttgactccagtcttgggggatttgtttagacagtggattaagttataattgcttaagacttaaagaaaagttttacgctcattttgctgattattaatgattttgagaatatttattaaaacgaatgtatggctatgtggtggttggttagcctagttccacgatatgcgccatcacgacctgttaggattttgggtcgtgacatgtatatccatgtgtatctgtgtgtgagatacatgcatgatacatgggtcatagcagaattttttaaactcaagtttagctatgaattttgataccaaatcaatccaaatcactttcaatattcctcaaaatttgtatattcactcatctatatgttttcgaagaatttcaaccatatcgatttttaaaatcttgtatatttttttatttgtatttcagcgttttgtttgctaccttatccatgaaattttctttccgtcttgcatctaatattactgatcacactttaagatatggaaggataaatttgcaaatgattctcatagagaaagaattgttatttatctgaattgttaatttctgtattcacttgactagtttggaatggtataggaacacttagttccttaaggttggccttaaaggccaagtttgacttcggtcaacatttttagtaaacgacatcggaatcgagattcgaaggttctagtagattcgtatgatgatttcgaacttgggcgtgtgttcgaaacgggttttggatgacccgggagcatttcggcgcctaatagtaaaataaggtttccttaagtttaaacttgaggtttggaacgtgtttttgtgttatcgaagtccaaatggaattctgaggtggggaatagtttttttatgtcatttatgacttgattggaaaatttggtgtcattccgagtagtataggtaggttcggcgcattaatagcaaattcaagaacttaaagttcttaaatttgatccaataggttttgtggtatgatttttagatttagcattgtttcggacgtttcgatggctcgaacgagtccgtattatgatttaggacttgttggtatatttggacggggtctcgagtgggcccggatgccattcaaacatcgcgcgagtcaaaaaccagccttcaaatgactgctggtgcacccgatctggtgcgaccgcacctgcggtgggctagccgcaggtgtgagaccgcttatgcggtcccaacttcgcatgtgcgaactctgagggagctgcctatattccgcagatacggacccctttttcgcagaagcggagccgcaggtgcggactccgctccgcaggtgcgaagccagacccccttcccatttttcgcaggtgcgagatttttctcgcagatgcgagatcgcatgtgcgatcctcgagccgcaggtgtgaaaatcttgtaggcagtgaggtcgtcttatatgcgagacttaaccattttttaactacttttcatcactttgggcgatttggagtgctggtgaagaggggattcagccttggaatcttaaggtaagtaattcctaccacaaaatgagtttattacttgaagttttggatagattaacacattagattagtggaaaatcatagttttagagtaaaacctagggttttgacaaaaatgagaatttaccaagaaattgattatggaatcatacaaaaactatataatattgatccttaggctatggatgattatttccttcgaaaatttccagaatccgagcatgtgggcccgggggtgtattttaggattcttcaatttaggttgagatgatcatttaagtaggagaattatggacttttgagcacagattgacttgttaatgtgatgtttggctagcttcgagttcttgggcgacgaatttggagtttcaggcgcatttttgacccggaaggtagacttgacacgaggtaagtctcctttctaaccttgtaagagggaattgtccccatatgtgaatatatataattgcatgctattatttgtgggggctacgcacacacgaagtgacgagagtccgtgcgtagctactattatgttatgccggggagtttaggattcacaagcataccttacgtgccatatctataatcttaaatgttaatttaggttgcctaatatccttgaattattaagcgaacatctaggagattacattctgaaatttatattattgaatccttctctgtaagtgtattctctactgaatttcctgttaattatgtgtatatatacgggtacccgcgtcgcatgtatgattcgcgagcgaggtagccctactattatgtcaaccgcatcgcatgttcgattcgtaagcggtgtaatagatgcatctatggttcgagccattctacccttcggcagtgcacatttatttttgcgtcgtatcgaccgtacgttcacgacacgttatgtgttattagttgtttgggtgttccgtgattatgtattggttgaatatcatgaacaatgaaaactaggtaatttgcatgatagagaacttgacatataaaggtatttgtaaatgatatttgatgttcctgtcttcatttttattcatgattgtcattcctgcttagccttacatttaaaacatattatattgaccctagtaagtgtcacgtcgacctctcgtcactacctcttcgagattaggcgggatacttactggttacatattgtttatgtactcatgctatgctctatacttaattgtacatgtactgaggcaggtgcatctgggtatcaatccggagcccattcctgatctatatctcgtcgaggcttcacggtgagctgcttctcctgacgacttccagcagcactttggagctattcttttgccatttctgtctatatttactcagacagtaggacatacttttatttcttttttatattattctactagatgcctgtagacttgtgacactagttcctggcacacacgttaatagacattagttttgggatgtgaaggttaaattatgactcttatggttatttatatttgggatttgcctaagtcactcgtcttcagttaatgtcttaaatttaaatcaagtaagtgatggaaaggttttgctaaattaaatgaaactcactagtaaattagtattgacttgcctgacaacggtgttgggcggcatcgcgacgtgaactaggatttgggtcatgatacatgatatcagagctttaggttcacataggtctcataatttacgggcaaacccaatatagtcttgtggatcggtacagagacgtctgtatttatcttcgggaggctatatggtattaggaaatctctctttattcatcttctatcgtatagttgatggtatattaaatctcactcttctattctctcacagatggttaggacacgcagccgatgttccggacccataaggggccgctacccccgtcatccgaggccgtggtagaggtcgggggagggcaccgacctgaggtaggggacaagggcgtccctgagctgttctagttgcaccgccagcggatccagtagaggatcccatcactgaggagcaaggcgaggtgcctgcatcagatcctgccccgtcgtacttcatgacggcaccgggattccaggaggttatgggccgtatgatgcggttcatggacaccatgactcaggctggtttatttccagcggatccggccacatcttaggcgggagggggagcacagacccctacttcccaggccgcagttcatgcagcagcaatatatcagaccccgggtacgctacccgtgggcggggtccagtcagtagtagcagcacctgagcccagactagctacggacggtgatccgcagaagctattggacagatggaccagactacacccttttgtcttcggaggcgagcgtcatgaggacgcccaggactttattgataggtgcagggacagactgcacaacatgaggatattggagtcctacgaagttgacttcactacttttcagctagagggcagggcccgcagatggtggaagtccagcagattctcctcccctcactgggagcagttcactcagtttttcatggacagatacatttcaccctttgagagggaagagctacggtatcagttcgagcagctagagcagggtcagatgttagtgaccgactacgaggctaggtattctgagctgtctcgttatgcactcatgatacttcctactgatgcagagagagtgcagagatttgtagttgggttacactcaggtattagggccaacatggcccgagaggtggatatggggactccttatcagcttgtggtggagattgctcgtaggattgagggttattggtcgaggagcagagagcaggggcagcaggataagagaggctggttttctggggattttagaggtgctccagctaggggcagaggtcagttttgtaggggctagcctagcatgtcctcatattcagcacccccaccaccacctcgaggtgctcctaagaggccttatttcagcgccttgccagagagttcttatcacccaccagccattcagggtccctccggcgggtattctagtcatcaggggtcttccagtccttatttcagagctatgcgagagagttcataccgtcctccagctatccagggttcttcagggcatcaggctatggtgccgagaggttgttatgagtgcggggacccagaccatattaagaggacttgtcccaggcttcggggcaaggccgtgtgataactaggatttttaccctattttctgccctcccttgcttaggttttggttataattgtacacaaaatagccccaaaagcttagatgttgcgcttgttgcaggattgaaccagaaatgatgacaatatgttaaggatatgctcaaacaggagtgaatcttgcacaagtaccaaaaaaacaacaaagtgcccaactcaagagccccatcgcagtcgcagttcatctttcgcagaccgcggtggcaaactttagaaaacctgttacaaggccaagtcccaccgcggccgcggtccatctttcgcggaccgcagtggcaaacttcagagaacctgttagaagtccaagtcccaccgcggccgcggtccatctttcgcgatccgcggtggcaaacttcagagaacctgatacaaagccaagtcccaccgtggccgcggtctatctttcgcggtccgcggtggcaatcttcagagggcccttcacaagcattctcccaccaaggccgcggtcgagcattttcagagacccagaagtgaaggtccatgctcttcaccgcggaccgcagtcgattttacgcggtccgcggtaatcccgcatgggcaattttgtccaaaattttggttgagtataaatagcatattttataattttcttagatcatcttttgcatcagtgaatagaccagctcgtgaatagtgttctttttcatcttgttgctattttcttgtgattttaacattgaatatgtgtggattgtgttataaatcattagtatgggttctatttcatctctttcattgaatttatctttgattatgagtagctagacccattagctagggttgtggctcaatcctagtgtggatatttgatgggtttctaaaattagggtttggatgtttatgagtgttttctatttgggctaatttagggtgcttattgctataattggtggttgcaaacactaattgatcttcaattgacttgggtccttcttgagaaagaggatttgagttagaaaattggtccaccaagaaattaggacataatcaagagattggtagtctcaatcaattgggttgaatccagagatggtaaaaccctacttaagtcttaattaacgggttaaacctcgagagagtaataccctacttgaacctcaattgcttgcatatttgacacccaattggcctcgagagaggtaattagggcaaaaccactcaaactactgagaggtatatagtgagcaatttcgtgcattggttatagcataatccctaattaacatccttgccttaggaacttgaaatccgttgagtattcgcctaggtaaaagttataaccctagtgcctttatcaacataagaaaataacttcaaaacaaattagttagttaatttgcactcaacaatagtataattcttagtcgtaaattgaaaaccaccaaaatatgagaagtgtaattagaaacacgaggctctactagctcacatagacactcactccaattgttgactccctgaggattcgatcccgacctatcggataaaagatgcaccgacccttgtattcctactcttatagtagtgagggtaagagctaggggtgggcattcggtatttcggtttggtatttaagaatttcggttcggtatttcggtattcggtttatcaattgtgtataccaaataccgtaccaaattagttcggtacggttcggtatttattatttttgttcggtacagtttcggtaaagtattcggtttatgaataccaacgcaaatttcctctttatacccttcgccaaaagagcacatagagtagaaaatatcttttggcaggaacaaacgataataattaagaagatgcagtaattactaaagctaaaacataatagaaagtgaactaacacccaaaatgccttaaaacgctacaaaagcttttgcatttagaaatagctctataaacgctacaaacgctacatcacattcactgtgattcacagcagtctagaacaagcacaagaagtaccaactaggaattacattgggctggtcttagggcgacgggaaatgggaattacattgggttggacactaggtgtgttagtataggtagggtccaaaaaaatatatacttaaaattttggtatattcggtatattcggtatactgaatttttaaaattgtaataccgaaaaccgaaccgaaataccgaaataacgaaaaattaataccgaattagatcgaaataccgaaataaccgaacccgaaataccgaattaattcggttcggttcggaattcggtttttcggattttatgcccacccctagtaagagcagatcactttttggcaccgttgccggggatttaagacggtgttgattatccacgtgtctagtagcgttaagtatttttctttccttctatttttaaattttttgtttaatctactcaggtgaaaaatggcggatccaatgggaaacgttattgcgggggaggaggtatatgataatcaagaggatgaaatcaatcaattacctcaacaaagaaggggccgacaggccaatctacaaaatgatatcccataccctcccccacccccacctcctagagctgcccctcgggtccttccaaacgagggatatgctagtgctattgtcccaccgaggattcgggcggggaacttccaaattacaaacatgatgctcaccctcctagagcaacgagggtatttcaccggagccgcacaccagaatgcctataagcatctcaagggctttgtagatacttgctggggaagtaaacagacaaatgtatcggaggatgcattacgactccggttgttacctttctctcttcgggggaaagcccttgattggctcgagcgtcttcccaaccattaaatatcaacttgggataagctcgcggacaaattcatttccaaattcttttccccgagtcatatggcggcgcttcgtgatgaaatattggcattcaaacaagaacccaatgagcccttacatgagatatgggagatatataggaccatgattaaggaatgtccgaacaacgacatgactgaagccatgatccaacagactttctaccgagagatcaacaccatgaatcaatgtgtggtcaatcagttggccgatggaaattttatgaagttgacttatctcgaggcatgtgagattctagatgagatggctgacacatcatcggcttggcaaagtagagctaatgtacctcagggtgagaccggtgtgaatagtctccataaagagctccaagaacaagggcaagcaattgccgagctcactactactatgaaccagcttgccaaagcccaactccaacaattgcaagggccgaagcaagcgaatgccatggaaggagtgaacgtgttaggaaatcaaaggagacctcgggggaactccaagcaaaaccataatgatcaaggtgaccaagggcctagtgggtatggccaagaagaaaggtatgatcaccaaggggaagatgtgatgtatgcaaacaactatcaaggtcaagacaatagtcaaaacaacaatcaaaattggagaaaccaaggaaacaaccaaagttggaggactcaaataccaagaaattggaatagcaataacaatgctcggaattgggggaacaataatgatcgtcaatgggggaacaacaatgaccgacagtgggggaacaacaatgatgacaattggaatggaggcaacaacaacaacaactggggaggcaatggtaaccgagggtcaggctttcaaaggcccccgatgtaccaacaaccaagcaacccacctccgtaccaagctcaagggcaaagttcatcgagcacggatatgggtagaattgaaaatatgttcaagcagatgatggagagaaatgcagactccgatgctcagttggcctctcacaatacctccattaggaaccttgaagtacaaatgggccaaatttctcatgccttaaacacacgcccaaagggtgcactaccgagtgatacggtggtgaaccccaagggtgggaacaataacaataccggtcatgccatggcgatgaccacgcgaagtggaaaaggtggtgaagaaagtacttctaggaaaaagaagattattgttgatgatgatgatatgccccaaggagagttaccagttgaagtggaacaagtggtggatgatccaactacaagagaggtaagaattgatatacatgaaaaatgggaggagttggaaggggacgtgaacccgtctagggaacacatgattgatatgccggaaccggtggtcccacaagccaaggcaccatttcctaggccacctccccctaccctcaaagattggccaaaaaaaagcaagagactcaattcaagaattttattgatatgatgaagagtctcaccatcaatgtcccgttggttgaggccttggaacaaattcccggatacgctaagttcatgaaggaattagtcactaaaaagcggtccatggagtgtgaaaccatcaagatgactcaccaagtgagtgttatagttcactccatggcaccaaaacttaaagatccgggtgcttttaccattccttgcacgatcgggaaaacggactttgacaaagccttgtgtgatcttggagcaagtattaacttgattccctactcatttttcaagaccttaggaatcgtgcaacctagggcgacctctatgcggttgcaaatggcagataggtcaatgaaaatgcccctaggtataattgatgatgtgcttgtgcgggtggacaaattcatattgcccacgaattttgtcattctagattgtgaagtatattttgacgtccccattatcttaggaaggccattccttgccacgaggaaggccttggttgatgttgaagcaggggagctcactttacgagtgggcaatgagaaggtggtcttctatgtgtgtaaatcaatgaagcaacccaacaatactgaagtgtgctcttttatggacctcatgagagaggttattattgatgatgcaagtgctatgatccatgttgatgatccagtgaagttggtcttattgaatcatgaggactccatggtggatggtgttattgaaagtaccaatgcccttcaaggcatgggtgcttactcctatggtccagaaagttatctttggacttcgagaaccggaagactccaccaacaaagccctccatcgaagaacctccgaatctggagttgaagccactaccttcccacctcaagtatgaatatcttggtccatctagcactttacatgttattctatccatttgtctaacccaattgcaagtagactcaactttaaatgtgctacggacgaggaagaaagcaatagggtggactcttgcggatattcggggtattagccccgccttttgcatgcacaaaatcatattggaggatggagcagagccctccgtggaacatcacaggagactcaacgaggcaatgcaagaggtggtgaagaaggaaatcataaaatggctcgatgcgggagttgtctatccaatttcgaatagcgcttggaattccccagtcccatgcgttccaaaaaagggtggaatgacggtgataaaaaatgacaaaaatgagctcattcccacaagaacggtcaccgaatggcgggtgtgtatggactaccgcaagatcaacaaggtgatctgcaaggaccattttcctttgccattcctggatcagatgttggatatgcttgagggttgggccttctactgttttcttgacgggtattttggctacaatcaggttttgatcgccccagaggatcaatagaagaccacttttactttcccatatggcacttttgcctttgcccgtatgccattcggactttgcaacgcaccaaccactttccaaaggtgcatgatggaaatcttcaccgacatggtggaggacttccttgaattgtttatggatgactttagcatcgtaggggattatttagatgaatgcttgtgtaatcttgatagggtccttgctcgatgcgaagagacgaacttagtattgaattgggaaaaatgtcactttatggtggaagagggaattgtattgggccataagacatcaagaaatggcattgaagttgataaaccaaaaattgaagtgatctcaaagttgccaccacctacttcagttagaggagtccggagtttccttggtcacgccggtttttataggcgttttatcaaagacttctctaaggtggtaaatccattgtgcaagtttcttgagaaggatgctagattccattttgatgaacattgtatgcatgcctgtgaacttttaaaacacaagctcactactactcctatcatcacggtgccagattggagctcacccttcgagcttatgtgtgattcgagcgatgtagttgtgggtgctgtgctgggccagagggtggacaagatttttcaccctatctactacgctagcaagacaatgaatttggcccaaatgaattacacggtcacggagaaggagcttttggaaatagtctttgctatggagaaattttgtccttacttgatgggtgctaaggtcatagttcacactgaccatgcagcactacggtatctcatgactaaaaagtattccaaagcgaggcttatgtgttgggtattgttgcttcaagagtttgacttggagatagtggatagaaaaggaagtgaaaaccaagtggccgaccatctttctgggttggaggagcaaggtcgaccttgtgatggacttgaaatcaatgacagtttccctgatgagcaacttctttcgttgtcaatgcgagaaatgccatggtttgctgatattgccaattatcttgtcaccggcgttgtcccttgtgagctctcttctaaccaaaggaagaatcttaggagggatagcttggaattctattgggatgacccatacttattcaagatttgcactgatggggtcatccggagatgtgtaccgaaagaagaacaaaggtctattcttgagtcttgccactcctcaccgtatggtggtcatcatggagggacaagaacatcttcaaaggtgcttagatgtggtttattttggcctacattgtataaggatgtcggtgatctagttaaaaggtgtgataagtgtcaaagagccggggggatttccaagaaagatgagatgcctctaaattctatttttgaagtggatattttttatgtttggggtatcgatttcatgggcccatttgtgatctcttgtgggaacacgtacattctagtggcggtggattatgtttctaaatgggttgaagtcgtggctttacccaacaatgaggcccagagtgttattggtttcctcaagaagaacatctttactaggtttggcacacctcgtgctatcaccagtgatggggggtcacattttttgcaacaaagcctttgacaacttgctttccaagtatggtgtcaatcacaaagtcaccaccccctaccatccttaggcaagtggccaagtggaagtctctaacaaggaaataaagagtatattgtcaaatacggtcaatgctaataggaccgattgggcgaagaaattggatgatgctctttgggcttacaagaccgcttacaagacccgatcggtatgtgtccataccggttggtctttgggaaagcttgccatcttccggtggaattagagcacaaggctatgtggtccttgaaaaagttgaaccttgaatgggacgtggcggctaacctacgtgtggagcaactaaatgaactcgatgaattcagattccatgcgtgctccagttcgtccttgttcaaggacaagatgaagtaacttcatgacaagtatgctcggggcaaggagttcaaagttggtgacttggttctactgttcaattctcggttgaggctattcccgggaaaactcaagtcaaaatggagcgggcctttggaagtggtgcttgtgaccccatttggtgctcttgatctcaaaaacaaaagtggagaaattttcagagtcaatggacacggggtcaagcactaccttggaaagattgatgacaaccacgtggtggcacttcttcatcttacatgatcttggtaacatgcgtcgtgccgcgatattaaatcaggcgcttcttgggaggcaacccatgtgtcgttatttttgttcttctttgattatcttggtagtataggattcattgttacactaactgatttttggatgttgtaggatgattttgacacaggaaatatgctaagtatgaaaaagaacctgctctctaaagttggaaccgcggccgcggagccctcttgcactgcggaggatgattttcgcgatccgcggagccctcttgcactggaagtatctctctgaaccttgctccgcggtcgcggtcctcttttcgcggtccgcggagcccaagtactgggaagcacccctctgaagttacctcaccgcggttgcgatccaatttttgaggtccgcggtgaccgttggacttaagctcgttgacagtgcatgactgcggaccgtgctcaattttttgcggtccgcggtgggtaagtgtagtggtccccagtcctcctctataaatagaccattagggtttcatttcacactttacgcactctcactcctcagagctttaatttcactgtgtctcaacccaataattccaagttgcattttcatttattatcacttcatccaagcatctagtaagtgtaattatgattaattaacttcttaattttattattttcttccttatttggtagattaacttcttaattttgttattttctgccttatttggtagaatcatgttaggttagttcaaatttatcattttagaccctttgtatctaattgcaatgtttaaacacgtagggtttttactaaatgggcatttgaacgtgaaaatggataaatatttgaaaccctaggtgatcgtatgagtgcggttcgcagtccctttttcgcggaccgcggtgtttgaatcttacaatcccatcaatgatcgcggatcgtagacccttttttgcggtctgcggtgcttagattcagagaggtcagttaggtatcagtccttcactgcggaccgcaatgtttttctcgcggtctgcggtcctccttctgcagatcaattctcccttctgtcttctaatatgctctcatgttctagctactctttgtgacctaacaatgtttacatgtttgcaattgcagaaaatggtccaatcacaaggcggaggtcgtaaaccaacgggcaggggtgaatcattcggggggagaggcaagaaaatgataaagcttgatccaaaggtctgggaagaaatgaaaagaacaaggaaagctatacagacattagacaaagctgcttcccactcgaacaatgattatgtcccctccgaagccttgtcggaatctattccggagtacgtcgaagacttcccggaaaggtttcggctgaccaatgaaccatcagactctccccctgaccaagcatctacacactctgagtcagctaagggctcagtatccgggagtggccacacggactctacctcacctacaacttccttgtcaggggagcattttggagatgaagagggaggtgaaccctaagttggggggtgggggtggaacacacaaggaagccggttatatgggaagacagatttgttagtgaaccgacttttcatcaattccgggattggtggcccaagagaacactcatagtggagcgcaagttcacgatcaaagatttattgcctcacaacccaaatgtgaagaggcagtttactgagataaaaggctgggtttactttttctcttacctaccggatgccaatgagcacctcgtaaaggagttctacaccaacctggcatttctgcaaaaagactccaaggtaacaatggtaagaaatctcacggtgccttttgacgagacgactctgaatgcttatctagagatggacgaggtggatgacttcctttatcaggtgaaattagttgagaaagatgcagctcgaaactggctagctatgcacttagccaaacctggggagactcctgattggttgccagttgggaagtccattttcaggaagaccctgaactttgaagctaagggatgggaaacatttgtgtgcaacaagctagatccaacatttcatgaaaacaccattccactccggcgggttgtgcttattgcttccatcatggcggggttcccgatcaatgtcgggaatatcatgtccaccgtcatcaacagggtggtgaatggtggtgataaatcttacccttttcctaacttccttactatgtactttgaggatcatggggtggacaagaagcgcttcgatgtcaaagtgaagccaaaagctgatttctcatggtacgatttgcaagacgaggacaaccctaaaaggaagttcaagggtaaatccattgcttccactggccagtctgaagagccaatggttgtagtggagtcatctcagactcatccaaacattcctgagaggccaggcctatccacttttgtcgacccagccattccttcatccagggcatatcctctgattgcccacagactcagccagacactgaccagtatcaacaactggatgcagacagctacttctaagttgtctgtgatttctacgtctgtggcagctcaggccactcctccaccaccacaggtaccccagtccgttgaggacacgctaaaggaaattctggaaaactagaaaaagatcttggaagctgtggcggcacatgagaaagcattgacgaagctcacaaaggaaacaaagaagttgaggcgcacccgtgcttcaaaggagacagtggccgaactgaggaaagaggtggataagctgaagggggatcaaatacccttggacctgttgttcccggacccatctgcccagccagagcagctaccagagcaggagcaagagcccgataggccagcaaagcgaagaagggtgttgccccgtacagagggcattcaactagttttggcagacccaccagtacaggctcagggtacggagcagacccaaccctgggttcaggaggctcagagcacagagggacagtaccagccaccaccacagtcacagccggacccaccacaggcacaggaccccgcaccagccgagggccaatagggagttttctttactctctctctctctctctctcccatttttgagctctttttatatatatatatatagcattgaggacaatgataacttttagttaggggagtggccctgtagtgatattttgatttgatgatggtgattatataattcagacaatattttcttgtttattatgctttattttcatttttggtatgtaaataactttaccatttcaacacttttatgaattttcactttttatatgtataaagttacctcccattgtatatattcatccccttatgtatattcgactaaacccctcatgtatatattcattctatcctacgtattttacttttcgcactttttcgttttataacttcttatttttctttcatagcttcttatttggaatttttcgtgtgcaataagcctttggttttcttaacgccacggttctttccaaaggttgaattcgtgtgaaccggatggctcttcccgaggatggatagtgtgacaactttcttaagggtttgagtctgttttttttgttatttcccttttgtttttatttttctttctttttaataatagtgaataaagatgcctcaagaaaagcttcacttgggcctaacacatttgcctttgatcccatggtcaaaaataaatcgttgtgtttaggatggtgaaagttgtgatcttaagactcttgtgttggccgataatcatcaagtggtttttcgggaccattgtgatgctcaaagcttgactaaggtcgttgttggcccccgactctgtttctgtagcaatcccatagctagagtggtgagattttgaattgcaagtccacgtcccgtgccattagtctagaacttgccctgaatgtttgtctaggcgaaatcctaagtgtaatttgacttgagaagtgactatcggctttccttgatccgaatagtgaattgaacatttctatggcctaccaaaaacaaattccctagtcaacccttttgagccttagaccccttctttaaaaaaccatgctacaagccttcacccattttgaccctctcttggcacccgatctttccttagcactaggcaaaagcataagtttgggggggagacgagggatgcaataaagtgaagaaggcacaaaatgaacgaaaaggaaagtcaatgaaaaagaaaagaaaagaaacatcaaagaaaagaaaagaatgaacaagtggaagaaataaaaagggaatcaatgaaagaatggtgatcaaaggtgtggaatgcctagaaacaggggaaactgaactgaatgaacaaaatggcgtgacagtacgtctctccaacccttcagaaagaggtataatgactcaaaaagtcaagaaaatgtgaaaacaaaaatgaagtgcttaaggaaagatagagctcactttgaccaaatacttcctacccttgaccaaaatccttcatcatgtgtccacaaaagccctatatgatcttgagttgaatgaaacttacattagtggtgacttacataaggggcaagcctatggtactttgagccggacttgagtcttttcttggagagagatgagtgaactcccattttcctcgttctgagcgttactattctaaagtgaggtgcttagggagagttgtggagtacgagtttgggttccacaatgaccgaagtggtaattcgagttttgttgatgagtcatgtcaactcttgatgctcttgtatcgcagttgaaaccagggttttaaaaggttcaaatattgttaatgattcatttgcattaaggtctattgttagtcccaattaatgctagatgaggttaccttaggacagccggactttcttggaaccagtcatagggtgaggcttactttgtttgcttgaggaaaagcaaaagcttaagtttgggggagttgataactaagtttttaaccctattttccgccctcacttgcttaagttttggttataattgtacacaaaatagccccaaaagcatatatgttgcgcttgttgcaggattgaaccaaaaatgacaacaatcagtcaaggatatgctcaaacaggagtgaatcttgcacaagtaccaaaaaaacaacaaagtgcccaactcaagagccccatcgcggtcgcggtccatctttcgcggaccgtggtggaaaacttcagagaacctgttacaaggccaagtcccaccgtggccgcggtccatctttcgcgatccgcggtggcatacttcagagatcctgttacaaggccaagtcccaccacgtccgcggtccatctttcgcggtccacagtggaaaacttcagagacctgatacaaagccaagtcccaccgcggccgcggtctatctttcgcggtccgcggtggcaatcttcagagggcccttcacaagaattctccccccgtggccgcggtccatttaccgcggaccgcggtcgagcattttcagagacccagaaatgaaggcccatgttgttcaccatgaaccgcggtaaccacgcaggggaaattttgtccaaaattttggctgagtataaatggcatattttgtaattttcttagatcatcttttgcatcagtgaatagaccagctcatgaatagtgttctttttcatcttgttgctattttcttgtgattttaacattgaatctctgtggtttgtgttataaatcattagtatgggttctattttatctctttaattgaatttatctttgattacgagtagatagacccattagctagggttgtggctcaaccctaatatggatatttgatggatttctaaaattagggtatggatgtttatgggtgtttgctatttgggctaatttagggttcttattgctataattggtggttgcaaacactaattgatcttcaattgacttgggtccttcttgagaataagtctagaaaattggtccaccaagaaattaggacataatcaagagattggtagtcccaatcaattgggttgaatccagagatggtaaaaccctacttgagtcttaattaacgggttaaacctcgagagagtaataccctacttgaacctcaattgcttgcatatttgacacccaattggcctcgagagaggtaattagggaaaaaccactcaaactaccgagaggtatagagtgggaaatttcgtgcattggttatagcataatccctaattaacatccttgccttaggaacttgaaatctgtttgagtatttgcctaggtaaaagttataaccctagtgcctttatcaatataagaaaacaacttcaaaataaattagttagttaatttgcactcaacaatagtataattcttagtcgtaaattgaaaccaccaaaatatgagaagtgtaattagaaacacgaggctctactagctcacatagacactcactccaattgttgactctctgaggattcgatcccgacctatcgggtaaaagctacaccgacccttgtcttcctactcttatagtagtgatggtaagagcagccttgttcatatgtatcacccttgtttgctcatttcttggatattcctcacgagtctttgggtactcttatttatgcgtccactcctgtgggctattatgtggtggtagaccggatttatcggtcctatatggttacattatgtggattcgagaccagagcggacctcctgttgcttgatatggttgattttgaggtcatcctgggcatggactcgctatctccctatcattccattctatatttccatgccaagactgttactctagccatgccctagttgtcgagattggagtggagaggttcctcagttagtgcagctagtcgagttatttctttcctgaaggctcgacgtatggtcgagaagggttgtttggcttatcttgcttatgtgcgggacaccaccgtcgagtctttgatgattgattcagtgccggtagtttgagagtttgctgatgtattcccttcagaccttccaggcatgccaccagattgtggcattgatttttgcattcacttagctccaggcacccaccctatatctattcccacataccgtatggctacgaaggaattgaaggagttgaaagaacaacttgaggagttgttggctaaggggtttatcagaccgagcatatcgccttggggtgctccagtgttatttgtgaagaagaaggatgggactatgcggatgtgtattgactaccgctggttgaacaaggtcaccatcaagaacaagtacccttgccgtgtatcgatgatttgtttgaccagttgcagggtgctcgggtgttttctaagattgacttgagatcgggataccatcagctgaagattcgggactcagatgttccgaagactgcctttcgtacgagatatggtcattatgaattcctggtgatgtcatttggattgactaatgccccagcaacatttatggacttgatgaacagggtgttcaggacttatattgattcttttgtcattgtctttattgatgacattctgatttactcacgtaatctgggggagcacgaggagcatttgagagttgtgctccagactttgcgagagcaaaatatgtatgctaagttctccaaatgtgagttttggttggattctgtggcattcttgggacacgtggtatccagaaagggtatcaaggtggatcctaagaagattgaggcagttcagagttggccacgccctacttcagctacagagatcaggagcttcttgggtctggcaggttattatcgccgatttgtggaggtcttttcatccattgcagctcctctgactagattgacccagaagaattccccattccgatggtccgacgactatgaggcgagctttcagaagctcaagacaacatttacctcagcaccagttctagtattgccttccggttctgggatgtatacagtttattgcgatgcttcatgcattggtttgggttgtgtgtgtatgcaggaggggagagttattgcctatgcttcacggcagctgaaggttcatgagaagaattaccttgtgcacgatttggagttggcggcgattgttcatgctcttaagatttggaggaactacttgtatggggtgccttgtgaggtttatacagaccaccgcagtttgaagaacttgttcaagcagagggatcttaatttgaggcagcgtaggtggcttgagtttctgaaggattatgacatcaccattctttatcatccgggcaaaacgaatgttgttgcagatgccttaaacaggaaggcggagagtatgggtagcttggctttcatttcagcggagaagaggccactagctttggacattcagtccgtggctaatcgcctggtgaggttggacctttcagagcccagtcgagttcttgcacgtgtggttgcttagtcttcattattgggggagatcaagtatcggcagttaaataatccggacttggtggctctccgggagacagtggtacagggtggtgccaaagaggtttctattggcgaagatggtgttctgagacttcagggtcgcttatgtgttcctaatgttgatggcatgagagagaggattctagaggagactcatagttcacggtattttattcatcctggtgctacgaagatgtatcgtgacttgaagcagcatttctggtggaggcggatgaagaaagacatagtggagtatgtggctagatgtctgaattaccagcaggttaagtatgagaaccagagactaggaggcctacttaagtagatgcctatacctgagtggaagtgggagcgcatcactatggacttcgtagttgggttgcctcggactttacgtaaggttgatggggtttgggtcattgtggacaggttgaccaagtcggcacatttcattccagtagctactaattacacttcagagaggttggcctagatctacattcgggagatagttcggttgcacggtgtgcctgtgtccattatatcagatcgaggtcctcagtttacctcgcatttctggagagcagtgcagagtgagttaggcacccgggtagagctcagcacaacattcaaccctcataccgacgggcagtcggggcagacagttcaaatattggaggacatgctcagagcatgtgtgattgactttggagggcagtgggaccagttctttcctttggccgaatttgcttataataacagttatcagtccaacatcgatatggctacatttgaggccttgtatggtcggcgatgtcgttctcccatcgggtggtttgagcctggtgaggctaagctatatggcaccgacccggtgaaggatgccttggagaaggtgaagttgattcaggagagacttcgcacagcacagtctagacaaaagagttacgcggatcagaaggcgcgtgatgtatcatttatggagggagagaaggttctgttgaaagtctcgccgatgaagggtattatgaggtttgggaagaagggaaagctgagcccaaggtttataggtccattcgaggtgttgaggcgagttggggggtcgcttatgagcttgctttacctcccagtttatcaggagttcatccggtatttcatgtatccatgctccggaggtactacgccgacttctctcacgtgatagatttcagcaccattcagctagatgagaggttgggctacgagcagaagacagttgctattattgacaggcaggatcgccagttgaggtccaagagggtttccaccgttaaggtccagtggaaggggcaaccagtcgaggaggcgacttaggagtccgaggaggacatgcgaagcagatatccacacttattcagcactccaggtatgattctagactcattcgaggacgaatatttgtttaagaggtggagagtgtaacgacccgacagatcatgttgcgttttagaacctcgtgcccctaaataagacttctcgtagttgcttttactgaattatgacttgcggggacgggtggttcgaggtttggaggagtttgggatagtataggaacacttagttccttaaggttggccttaaaggccaagtttgactccggtcaacatttttagtaaacgacctcagaatcgagatttgaaggttccaataggttcgtatgaagatttcggacttgggagtgtgttcggaacgggttttggatgacccgggagtgtttcggcgcctaatagtgaaataaggtttccttaagtttaaacttgaggtttggaacgtgtttttgtgttatcgaggtccatacggaattccgagaccgtaaatagttgtgttatgtcatttatgactagcttgcaaaatttggtgtcattccgagtagtataggtaggttcggcgcattgatatcaaattcaagaacttaaagttcttaagtttgatccaataggttttggggtatgattttagatttaacgttgtttcagacgttttgaaggcttgagcaagtccgtattatgatttaggacttgttggtatatttggatggggtctcgaatgggcccggatgtcattctgacatcgcgcgcggcaaaaaccagccttcaaatgactgctggtgcactagatctggtgcgaccgcacctgcggtgggctagcctcaggtgagagacctcttatgcggtcccagcttcgcaggtgcgacctatgagggagctgcctatgttcctcatatgtggacccccttttcgcagaagcggagccgcaggtgcggactccgctccgcaggtgcgaagcgaggccccctccccattttccgcagatgcgagatttttctcgcagatgcgagaccgcaggtgcgaaaaacctataggtagcgagttcgtcttaaatgcgaaaccgcaggtgcgaaaaacctgtaggtagcgagttcgtcttaaatgcgagacttaaccatttttgaaccattttcatcactttgggcgatttggagagtttgtgaagaggggattcgacctaggaatcttaaggtaagtaattcctaccacaaaatgagtttattacttgaagttttgggtagattaacacattagattagtggaaaatcataggactagagtaaaacctagggttttgacaaaaacgagaatttaccaagaaattgattatggattcatataaaaaccatataatattgatccttaggctatgggtgattatttcctttgaaaattttcggaatccgaacatgtgggcccaggggttgtattttaggattcttcaatttaggttgagatgataatttaagtaggagaattatggacttttgagcatagactgacttgttaatgtgatatttggctagcttcgagttcttgggcgacgaatttagagtttcgggcgcattcttgacccgaaaggtagacttgacacgaggtaagtctcctttataaccttgtaatagggaattgtccccataggtgaatatatataattgcatgctattatttgtgggggctacgcacgcacgaagtgacgagagtccgtgcgtagctactattatgttatgccggggagtttaggattcacaagcataccttacgtgccatatctataatcttaaatgttaatttaggttgcctaatatccttgaattattaagtgaacatctaggagattacattctgaaatttatattattgaatccctctctgtaagtatattctctactgaatttcctgatttcctgttagttatgtgtatatatacgggtaccggcgttgcatgtatgattcccgagcggggtagccctactattatgtcaaccgcgtcgcatgttcgaatcgtaagcggtgtaatagatgcatctatggttcgatccattcgacccttcggcagtgcacatttattttcgcctcgtatcgaccgtacgttcacgacacgttatgtgttgttagttgtttgggtgttccgtgattatgtatctgttgaatatcaagaccaattaaaactaagtaatttgcatgatagagaacttgacatataaaggtatttgtaaatgatatttgatgtttctgtcttcatttttattcatgtttgtcattcctgcttagccttacatttaaaacatattatattgaccctagtaagtgtcacgtcgacctctcgtcactacctcttcgagattaggcgggatacttactgggtacatattgtttatgtactcatgctacgctctgtacttaattgtataggttctgaggcaggtgcatctgggtatcaatccggagcctgttcttgatctatatctagtcgaggcttcacggtgagctgcttctcctaacgatttctagcagaactctggagatattctttttccatttctgtctatatttactcagacaataggattgacttttatttctttttgatattattctactagttgcttgtagacttgtgacactagttcctgacacacacgttaatagacatgatttttgggatgtgaaggttaaattatgactcttatggttatttatgtttgagattttcctaagtcactcgtcttcagttaatgtcttaaatttaaatcaagtaagtgatggaaaagttttgctaaattaaataaaacttactagtaaattagtatttgcttgcctgactacggtgttgggtgccatcgcgacctgagttaggatttgggtcgtgacagtcaaaattttgtttgtgttataaatagaattctatttaaggtaaatgtctatattttatagagatcttaggaattttacttggtggctaagtcactttttccctataaatagaggggtcttattccattgtaaatcatccctaaattcaataagaattttctttctatctttctctgcaatattgttcttcttttattgtttcataacacgttattagcacgagactctaaccaattgagtagaagcttcgggattgagcataatgattgtcaattgttccatgaacttctttcatgattaaattctggatttaaggtaagtattttgcattattttctgttttaaattcttgaaattctataatttgattttaaatgcaagcaaagacaataaactttgattataactcttatagagtttgcaagaaattataaccacccgaatggtaaaatttctataccttgccatgatataattcatgtatgattgtgggcaaagaagtgaaaacccatcccattgaatttgctcaattctcattcatcttaagagaatgtgatagcaatatatgataagtctgaaagaagacaaaattattaccgtgaaggtatcaatggatgtgaacgtggcaatagatgaaattataatcatcatcattttggtaatgagaacaataaggattctcaaaataatacttcactctgtcaaagtaatatttgttatcgatttgacatgagtttgtaaaacgcatattgattatggtccattcatgacgtgaatgtgacaacatgtgatttatgaatacatattcattcttggaagaatatgaacgtgctagttgtagtgaatataccacactcacctctaggatgaggtttgagatgatataggaaaatgacgtcattatttatgccaaaatattttaataatgtgattattaaaggataatagtaatgcaagaagcagatattgcatgtaattttaaccatgaccataatggtataactttcccttagaagtgtattcatcctatagatattgatgaataagtggtaatgcaaaattaattgaaagctctagaagagccaattatactactttggagaaataaaattgattatcaataataaattctattgtagtaaatctcaatgaaatttattaagtttctaaagtattcgcgaaagcagttggttatattgagactataaataaagaaatatcttctattactacaacttgtagcggggtaatattaaaaagttatccgctttattctccagtttgtactacataaataaaagaataccacaataaaatggatgtgtattgatataaaacccatatcataataaacttggagtttattgataattgacacgtcatggtgtaaatttgaacattatcaatattgataatttattcagttggcacgattggtttagccatatcaatttaagtatgatgtgcaaaaatgaaagagaattcacatgggtaaatattaaagaactagaagttctttacgaagtctcttatattgcttgtgctcattaactgataaaccaggattgaatcccatgaatgctggaaatatcaaaggtgaatctgggctcattcacctgccatgtattccacatatgatgcatccatatgtgcgattattattaacccgcaacatgatatttgcgaggtaactttctcaataatttaatttcgagcataatttctagattttctattcaagatagtttatcttgataagttggtttcgtttagcaaaatgatttaatgagtgccttcacttaatagctaaactattgcttatgagaacaccgttatctacattattttgatatacgttatatacgaaagtatattacattctcccctcacaagtggttcaggatcagaagccaaattattccatcttattattattgatgtgcagtgtatattttggttaacaccataacacacaaagatggattcccaaagttgaggaagcaagttagttttctaacatgaggggtagagatgataaacatttgagaaaatgttacgtggaatgaattatcaattctctataagcatgataatatgataacgaagattttcaaggtgcaacatattcattgaagttaatttggatgatttattcatcaaatctctgctgacatcaacatccaagaagctagtgcacaagattgggatgcgaatgctcaatgatgtgaatggttgctctcatcaaggggagttaatacgcattgcactattttttccttacaaggttttgtcccactgggttttccttgcaaggtttttaacgaggcaaccaaaaggcgtattgttagatatgtgtactcttttttcttctctagaatttttttcctattggttttattttagttaaggttttaacgaggcatattatttgttgataaacattcaagggagagtgttataaatagaattctatttaaggtgaatgtctatattttagagagatcttaaggattttacttggtggctaagtcatttttcccctataaatagaggggtcctattctattgtaaatcatccctaaattcaataagaatttcctgtctatctttctctgcaatattgttcttcttcttttattgtttcataacaatttgatggaaacttatgtgtattttataatttaaaaagtttatagttataccaatgaaaattattaatgtttttaataaataaccacacatcatgtaagcagaccaagtttgcattcaatttttcggttttgaaaaagtgcgatcctccggaccaaactaagtttagtttggtacgggttattttttagttcgtttctttgcgggttggttatgcagttgttcaattaagtcacataagataattaacataatcgaataaaattttcaaaactaacatatattatatagaatgagatggaataatattaaatctcattaatataattttctaatataagtcacgggtaaaactcttaaaacacaatatttaaaagtaacatgtctaagggtgtgtttggggtaaagaacaaccaaactgccgcccccaaataaaaaaaagttttttttttattttatttttataatttttaaatttctgtttttacgtttttctgcacgcccccgcccccacccttggcgcacaaaaaaaaaaaaaattcttttgtaatttcaaatttctgtttttacgtttttctgcacacccccccccccccccccccccccggggaaataaatatttttttatatattttttattttaattttttcattttcgattaaagcttcgcaatcaaaatagtacttagtaaagacgagaaacaaggatttatattttaaagatgaaaaacgaggtgttgtataccctagtacaaaactacaaatagacaagtaaacaagcaaagctggaagtaatctaacactcaaatactaactctcgtaatgggtgtgtgtatacatatactaaatattttgatttttttcattttcggtttttattttcttaaatctcaaaccaaacaaaaaaattaaaattttaatttctcaatccgaaaccaaaccaataaaaacaaaaaattaatccataaaattttgattcggttcagtttgatttttctgtttaatccgaataatgcacacccctatatccagcaccatcatattcctttcttatctaaaacatactaatttcaaaaacagtgttacaaatcatagccgagatatataaataatttgaggtatatatctttcagtaaaattatcggaaaaatattacgtatgttatgaaacaataaaagaagaagaacaatattgcagagaaagatagagaggaaattcttattgaattttgggatgatctacaatggggtaagaccccactatttatagggaaagagtgacttagccaccaagtaacaaaccctagaatctctctagaatatagacattcaccataaataaaattctatttataacactccctcttgaatgtctattcaacagataatgtgtctcactaaaaccttaactaaaataaaacccaatgggaaaaacaattctaaaaaaggaaaaagagtacacatgtttaaaaatacgcattttggttgcctcgttaaaaaccttgcaaggaaaacctagtgggacaaaactttgtaaggaaaaaagagtgcaacgcgcattaactccccctgatgagagcatcaattcacatccttgagccttcacatctcaatcttgtgtattagcttcttgaaggttgatgttggtagagattttgtgaacaaatcaatcttattatcacttgaatgaatctgttgcacattgatatcaccattcctttgaagatcatgtgtgaaaaataacgttggtgaaatatgctttgtcctatctccttttatgaatcctccattcaattcgtctatgcatgctgcattgtcttcatacagaatcgtgggtagtttgtcacaatttaaaccacatttgtctcgaataagatgtattatagacctcaaccacacatattctcgacttccttcatgaataacaattatctcagcatgattagatgaagtagccacgatcgattgcttaatcgatcgccaggatatgacagtgcctccacatgtaaacacatagcgtgtttgagatcgagccttgtgcgggtcagataaatacccagcatcggcatagccaacaagatcgggactgcaattattgccataaaataagtccatatcggtagtcccttttagataccacaatatgtgtttgattccattccaatgtctccttgtaggagcagagctatatcttgctaagacattaactgaaaaagttatctcaggtcttgtagtgttggaaagatacattagtgcaccaattgcactaagatatggtagttcaggaccaagtaggtcttcattctcttcttgaggtcagaatagatccttattcacatcaagtgatcgaacaaccatcagagtacttaatggatgtgctccatccatataaaactattttagtaccttttctgtgtaggtagattgatgaacaaaaattccgtttgccaaatgttcaatttgcaaaccaagacataattttgtctttccgagatctttcatcttgaattctttcttcaaataatcaattgccttttggagttctatatgagttccaataaggtttatgtcatcaacatatacggcaagtacaacaaatttcgatgttgttttctttgtaaaaacacagggacaaatggcatcatttatataactttcctttaataaatactcactaagacgattataccacatacgtcctagttgctttagaccataaaaaagatctttgcaatttgattgaaaatatttccctagattttgaattatgtgcgttaagcattttaaatccctcggaaattttcatgtatatctcattatcaagtgagccataaaggtaggcagtaaccacatccattaaatgcatgtcaagcttttcttggacaaaataactaatgagatagcggaacgttatagcatccataacggatgaatatgtctcttcataatcgacaccaagtctttgtgaaaatcctcgtgcaacaaggcgtgccttatatctttgtacctcatttttctcattcctcttgcgtacaaagacccatttatagccaacaagcttaacaccattaggtgtttggactacgggcccaaaaacttcacgtttctcaagtgaattcaactctgattggattgctttttgccattttgaccaatcacgtctttgtcgacattctccaacagattgaggttcaagatcttcactatcttgcataatgttagatgcaacattatatgcaaagacataatccaccactatatccaatcgatttaaatttgtctcaatatcaattggatttattgatagttccttattttcttgagtctcgggctcagtggtttcctcatgaatctcagaatttattaaatcgtggatttcttcacgagactttttcgtagtgtcattttgatcatttgttttcctttttctaggatttcgatccttcgaacctaatgtcctgccacgttttaggcgtgcttttgactcattagctatgtcactagaagattgtccaatagggacatcaatacggattggaatattctctgcagggatatgtgattttgttacccttttcaaatctgtaaatgcgtctggcatttgatttgctattctttgcaaatggataatcttttgcacctctttttcacaaatagaggtacgtggatcaatatgagacaatgatggatttttcaacaaaattttctgtttggtttcaccaatttcttcccctaattttgggaaaagagtctcatcgaatcgacagtctgcaaatcgagcaataaatcccccgttaatgtttcaagatagcgaataatggagggcgattcaaacccaacatatattcctaaccttcttcggggacccattttggtgcgatatggcgatgctacatgcacatatactgcgcatccaaaaattcttaaatgggatatattaggttcatggcccaaaactaattgcaacggagaatatttatgataatttgtcggtttgagacaaactagcattgttgcatgcaaaatggcgtgaccctaaaaagaagtgggcaagctcgttttcatgagtaacggtcttgctatgaattgcagacgtttaattaaagactctgcaaggccattttgagtatgaacatgagctacacgatgtttcacttttatcccaattgataagcaataatcattaaattcttgggatgaaaactcaacaacattatcaagtctaataggtttaattggattatcagggaattgcgcccgtaatcgaattatttgtgtcattaattttgcaaacgcgaggttgcgagatgacaatatgcaaacatgagaccatctagaggatgaatctataagatcataaaatatctgaacgactcactaggtgggtgaataggtccacaaatgtccccttgtatacgttccaaaaacgcagggggctcaatcccaacctttgttggtgatggtttaataattaacttgccttgataacaagaagtgcaaaaaaattcactatttaaaagaatctttaaattctttaatggatgcccatttgagttttctataattcgtctcatcataattgatccaggatgtcccaattgatcatgccaaagtacaaaagtattggaattagtaaccttttggtttacggtagaatgtgcctcaattgcactaattcttgtccaatacatgccacaagataaagatgggaacttctcaataaccctcttttgtccgagacatttttggtaatgatgagatattcaagattattctcatctattgtctcaatatgatatccatttcggcgaatatctttaaaactcaacaagttcctcttggatttggaggagaacattgcattctctatgataagtattgttcccttaggccaagttatagtagcttttccagagccttcaattaatttactactaccagaaattgtagtaacatttgccttacacatacttaaatgagagaaatatttcttctctttcaatattgtatgtgtcgtacatgaatcaactaaacaaatattattacaattaaacattgatccaggtttattttgtgagatatccatattttcttaatattctcaaagagcttcttgagacggtagagtctcgtgctgataacatattatgaaacaataaaagaagaagaacaatattgaagagaaagagagaggggattcttattgaattttgggatgatctataatgttgtaagacccctctatctatagggaaagagtgacttagccaccaagtaaaaaaccctataatctctctagaatatagacattcaccataaatagaattctatttataacaacgtaataattttaaaatatttaatgttggtaaaagctttttcttttgttacctcaactatctatttctgctcaatttctctcttgagaaagcttaatgcttctcacataaggattttccatttctctaaattttttgaatatagagattttccattaaaatatatcatcttaaccagaaaacataacaataatatatgtaaatattttgaggtaactaattactttaactaacattattgagaaaatattaataattttttacaaacatttatattaggatttccttttgcctcatgttatttatttcttggcaatatctctcttgggaaaacttactacttctcacatgagttgtcacgaccgaaatcttaattcagatcgtgatgacgcccaacaccgtagtcgggcaagccaaccattaacttactagagaatttaacttaattgcaaaagaacatttccaacacctacccaattcaagtctaaaacattaagtaggaacgggaaaattaactaacttaaacaaatatagccataaaggatcataaaccaatatatacaaccccaaaagatataatatctactacgtatgtgccaggaattagtgtcacaagtcgacaggcgtactagtagagtattcaaaagatgaaataaactgtcctactgactgaaagaagtagacaggaataaacaaaagaggactccatagtgctgctgagaattgtcaagggaagcagctcaccgtgaagtcaagtccagatataactcagggtcgagctccggcctgataaccagatgcaccagctccagaacctgtacaattaactacaaaagcgtagcatgagtacataaacaaatatgtacccagtgagtatcccgcctaacctcgaagaagtagtgacgagaggttgacgtgatactgactaaggctaaacaatataataaatacagactaaatagaaatagcagtaatgaacgataataaggaaaggagcatcaaataacgttctctagtacctttacgtatcaacttccatagcatacaagctatctaaccttccctttttcataaaatcaacagatacaattacagggcttcccatcaatcatcaaacacataataggtcatgaacgtaagaccgatacgacgtgaaaagtaaatttgcattggcgaagggtcgaacagctcgaaccatagatgcatctatctgccccgctcgcgaatcgaacatgcgacgcggttaacataatactaggtctaccccgctctctaatcatacatgcgacacgggttcccgtatacatatacataattaacaggaatttcggataatttatcagggatcatacttagcaggaaatggttcaataatgtcaacttcgaaatataacctcatgggccttcatacgtgacattcaaggatattagactacctagaccacatgcaagatcacaaatacgacacataaaacatgcttgtgaatcctaaactacccgacaaggcataatagtagctacgcacggactctcgtcacttcgtgcgtgcgtagaccccacaaataaagacatgcaattatttataatcacctatggggacaattccctcttacaaggttagaatggagactcacctcgcgtcgagcctacttttcgggtcaagaatgcgcccgaaactccaaactcgtctcccaaggactcgaaactaataaaatgttgcataaataagttaatttatactcaaaagtatgaaattcccctatttaattagttatttcaacttactttgaaaaaatcccaaaatacaccccgggcccacatgctcggattccgaaaattttcgaaggaaacactcacccatatcctaaggatcaataatatatagtttttgtatgattccatggcaaattccttggtaattctctcattttccataaaacctaggtttttactctaacccatgatttcttactaattaacaggttaatatacttaagaattcaagtattaaactaaatttagagtaggaatcacttaccttacattatctaggtcgattatcccctttgaaatgctctaaaattgcccaaggaagaagaagaatgacaaaaattagactaagtctcgtttttaaaagtcactgcccagctgccccttctatgcgaacgcaggggcagtgcgttcgcgatgaacaaatggccaggccttctgaggccttctatgcaaacgcggaggggtgctcgcgaacgtggaggctatcctggctagacctacgcgaacgcggctggggtcctcgcgaacgcggaggctagcttggctagacctacgcgaatgcgactaggagggtgcgagcgcactgagtaagggctaatctgggctggcccatcgctttaccctatgcgaaagcgaagcacctatgcaaacacgtagggtaattttcacccctgcccagatacttctatgcgaacgcgacagtacaaccgcgaacgcatagaaggaaaccagatacagaaaatctggtgttttgcatttagctccgaggggtccaaaactcacccgagcccctcgggatcccatccaaaggcactggaaattctgtattcatgatacagactcgctcgaatttcggaacgtgaaaaacaacaacgaaactaagaatccgaccccaaaaccaaattgaatcaaactttgaacttcaagttctagaattcgctttcaatgcgccgaacctacctatactactcggaatgacacaaaattttgcaagaaagtcataaataacataacagaactattttcggtctcgaaattctgttcggacctcgataacacaaaaacacgttccaatcctcaatttttgaacttaaggaatcatatttcactatttggcgccgaaacgctcccgggtcatccaaaacccgttccggacatacgcctaagtatgaatcatcatacgaagctaccgaaaccatcgaaactcgattccgaggtcgtttactcaaaatgttgaccgaagtcaaacttggtcttaaaagccaaccttaaggaaccaagtgttcctatactattccaaactctttcaaatcccgaaccacccgtccccacaagtcataaattattaaaagcaactacgggaagtcttatttaggggaccgtgatcctagaacgcaaaatgaccggtcgggtcgttacatgagtacataatagatcttgtcttaacacggaaacactaaactaagatgaattaatttcgattcattgctcagtttatatatccactaatagacaaacataataaattgatctggcataataccgataataggagaagtcatgatttgacgcttatgtgttcgagatttttgttattttaaattattatattttaaattaacaatttatatatatcaataaataattcataccaaaacaacttatgttctatttactttttcatattctttttagtttcttcaaagctttattttcccctcttattttattaaaaaaagaattcctacttatctttgggggaaattcaaaaatagccagatttacaagtggtcattcaaaaatagccacagtttcaaaagtaatcgaaatttagtcacttttcatgtaaagataaatctgaacgaaaacactgttcaaaattcgaaaaatactccagcataatatactggaattccagtataatatgctggaactccagtataatatactgaagttccagcaaagtatactggacttccagcataatatattggagttccagtataatataccggtccagcataacatgctggaagttcatacacaggtgctccaatctccagtatattatgttggaactttccgcgtgttgaagttccagcataatatattgaagctcatacagaggtgcaccgatatccagtatattatgctggaactttccgtggaccagcaaaatagtagctatttttcaataattttacaaacgttggctatttttgaatgaccggttcgaaaactggctagcccgtgctatttttaggactttttacctagctatactataatagaaacctatttaccacatttatttaggctccttattaattactttgtttatctatattaacaagttatatacataaccttaaaaaagaataaaatttaagatcccttagttttagcccatttccaaaaaaccctcccctacatttaagattctgtttcttttttctccctttttttaaataatcacgcaaaatctctcttttatttttatatttccgcccccccccccccccccaattttccgattcatttccttttccaaatattttcaaacccaaattctctctttcttaaatcttactaatcacccaatctttatttcttaatcatacattgcagacaaaattcagaatattgctctagaatagagttgtgggtaagtttttaatcttattttctttctttctaaaatatttattgtatatgatacatcaatacccaaaacaatactcgatacaatactaccacaataacaaacaacaacaaacccagtttgatcccaacaggtggggtatggggagggtagtctgtacgcagaccttacccctacctaatgcaggttgagaggttgtttcaaatagaccctcggctcaggaagggcaagaagaagaaaaggaaagtaaggaaggaagaaagatggaagagaaaagaaaagggagagataaaagataagtagtaccaaataatagcaacatggaatacaatcctgaggcgaacaaaaaccacataacgtaataaacatctaagaatatgaggtacatgcatgctactaagactatcggtgaacactataaactacctactaaccttataccctaatcaaccacataacgtcataaaaatttaagaatatgaagggacatgcatgctactgagactatcagtgaacattataaactacctactaaccttctaccttaatcctcgacctccacaccctcctatgaagagtcatgtcctcagtgaactgaagcaacgccatgttctgcctaataacctctccccagtacttcttaggcctacctcgacctcttctcaaactctccatggacaacctctcgcacttcatgaaaggagcatcaatgcttcttctcttaacatgtccgaaccatctcaaccgcgaatcccgcatcttgtcctccacggattctactcccactttgtcccggatagcttcattcttaatcctatctctcctgttacacccacacatctatctcaacatcctcatctctgctaatctcatattctgcacatgggagttctttactggacaacactcagccccatacaacatagtcggtcgaaccaccactcaataaaacttacccttaagtcttagcggcacattcctatcacacaaaacaccaaaagtgagcctccacttcatccatcccgctccgatgcgatgtgtgacatcttcgtcaatctccctgttaccctggataatagacccgagatacttaaaactcgctctcttggggataacttgagcatcaagcttaacctctacgtttgcatcatgggccccgtcactgaatttgcactccaagtattctgtcttggttctactcagtttgaaacctttagactccaaggtatgtgtccaaacctccaacctcgcgttaactccgctacacatctcgtcaatcaacaccatatcattggcaaatagcatgcaccaaggcacctccccttggatgtgatgcgacagtacatccatcgccaaggaaaataaaaatgggctaagagccgatccctggtgcaaccccatcaccacagggaaatgctccgagtcaccacccacaacctctaacttccaaacacccccacaggacctccctcagaactttaccggatgccttctcaaggtcaataaacaccatatgcacatccttcttcctcttcctgcactgctctactgatctccttaccagatgaatcgcttccgtagtcgaatgccccgacatgaatccaaactgattctcggaaatagacatgcacctccccaccctggcctccaccacactctcccaaaccttcatagtatgactcaataacttgataccctataattgttgcaattttggatatcacacttgttcttgtaaagcggaaccatcgtactccacctatattcttcagccatcttctttgtcttaaaaataacattaaacaacctagtgagccactccaaacctgcccgccccccgctcttccaaaattccatcgggatttcgtctggctctgtcgctctgccgctgcacatcttacgcatcgcctcttccacctcctctaccataatccgcctacagtgcccaaaattctgccgactctcagagtgctccaactcacccagcacaatgcgtctatccccctcctcattcaacagtttatagaagtatgtctgccatcttctcctaatgagtgcctcgtccatcaacactttgccatcctcgtccttgatgcacttgacctggtctaagttgcaggctttcctctccgttgttgatacccaatttttccctataatagttttgaaatgcatatatacctttaaaactatgcattagcatcaattggtatttctccataatttctacattttaaagtaatttatcctagtattttatttatacaaaatcacaaattgcatcacaaatgattttaaaacattttcttgatttaatattactatttatggtcatagtaagttcaaattatttcataagttgccagatttacactttttggttacaattgtaataacttagcccacacacactttattgcattattttactaaaaatggctcattgtatttttgaaatgttgaataattatttaaaaacatttccatgcatgaaaattattttttacaatttattaattattttataaattaattatattctattatttgagtatttaacaagtagcccctttttttccccagcattaacctctctaaccagcccaaaccccttttaaaagaaagcccaatcccttaggcccaaaatttcaccttcccgatccaacacccatgtccaatcctgatcgttgatcgttttgatcaacggtccagatccctcttaccttaattaaacccaaatgaccccccccccccccccccccccgcaaacttctcattactcacctctcactagcgtcaccccttccctcttctctctcaactctctctaccgaaaccttagttctcaagcgccgtcagcagcatatctctcgctgtgaagtttccttgtattctccggccgatcctggcctcctactcaccatggttgtttggcttctcagatccttgagaggatctcagggaacccaagcggttctgctttgcacctttgcctctttgtctgtctcaggccattagctcgactatgagtaagagatctttcttatttctgttacaaatctatggtttctaaacctatgttctcactctgttatgttttctaaaaaaaacctagtttgttatcatcgttcttctcagatctgtatagatctgagatgaatcgagcaactcttacatgttttttctgaaaatatctgcttttaatcgataatttttgcttttccctaaaactagggttcattacgagttgtttttcaaaggtatttccgaattctaaatgtttaatcgattctccattcgtcttcttgaatgtctgtgcaaaagtagttaaaccctagtcgattttatgtgaaactctaattttctaatctttgcttcgattttgagtctttcagtgttaccagtcgtattgattcactatgtattttttgacttacacgattttcctttgtcaaatccagtattctgtaattttaccctaattgagctctattagggttcgaatttggctttccggctaatttctatatttttgtgaaatctttacttagtttatttttctatttatgggagttgatatattctttccagaaatcattgttactttgaaatttggctgattgatttgctctgttagagatgtgtatgccgaagtcttgcctgtttccctgtttacgaccttaattagtcattcttaccttatttgattgcatgtatatttactgattcatttacatcattctttccttaattagacccctgattattttattctgtactcctttatttggtctgatttgaacctcttgccttaattaatccctgttattaccgtttggctaattgcccttaattaagggaggtctatgatgaactcctttgtatgactggattatgtgaccccttaattgttggtttctgattcctttaccttatttgctctactcttgaactgatatataagcactcttattttacctctcaatacgaacactaagttcagaacacaaactcacactcaaactctctcttctttctctgctacttacgataactattggtctagccgcctgaaatccaaggctagacatttgaactacacctgctttacattctgcactttcttctttaactggtatgtctctatttaaattttgaaactcaaactccatgtgttccattcctgcactagttcaattggctatgtattcaatttgtttccctgtttactgctttggtcaacatgtctaaattttgtcttctcttgttcaatgtgtaatcagcatgtctaaacttcacttggttatttgatacttgtccaacatgtttacttagtccctgctcactccctttaactgtgtgatcatgttagttacttagtctcctgatgcattcgattgaccttaattgtacgtctaattctgtccaatacacccttgtcttcaacatgattttactacatgtcttaacttcctattatcatagctaacctgccaagtctcttagactcctaagtgttctatgcatttgttgtctatatgcctcccctataccttgctcatgtgcccctaatgtgaactttatgtgttcccaatccccttcacccctgtgtgtaaaggttgcctattaagtggttgtaattcttggctttctaagtctgtgtgattatatgttgaatactagctattccaattgatttcaaaactgtttttccactcttagtagttctttaaaactattcctactcctgaaaatcttttcactcttaaaggttatctctacactgtttttactaagtctttcaaaactatgtcaagcactctcactttactcttagactattaggttctgcccctccagtgtgtgtattgcctaggaatccatgagattcctccgaactctggcacactggggctggcccttccacactacacataaccaatccctatttgagaaaaggtcttggtatgagcactgcctgggatccctgaggtccttagggaactctgacacaccaggacacactattggctatgcggttcttggcatctgagactgtgttgaaggaatggcattcccaggttcactttgggcctgattcaggctccatatagtatagtttcatttacttatgtaattcattcgatcctggtctgtaataatttcctttgtcaactgatattggggtgattagtaaaaaggggagggttcctgcatgatttttgggaaatcgggtagaaatcctactttaggtttatagtatgttgatttgcaatagaaatcatgctttaggtttatattctgcaatagatatcatgcctctaggtttgctatgcttttttgtattaaaaaccatgtcataaatctatgcattagatatcctgccttaggacaatcatgtttactactttttgcatattagaaaacctgctatagttcgtcatttctgattcttcctaagccttaatcacctagaaatcctatcattaagttattactaatactatctaataaaatgaccttctccatgagcattagagatcctgttttaggactgtatgtgcatttgccttgaatcatgtcgcctaaataaacaacttaaaaacagccccaacacatagacatcatgtttggtgtaaataaacatgaaatcaactattgtaacattaatagcctagatcagtatgcctataggactgaataacttcaaactgctttaattagttcccagaattatgattgcgaacaattccacgcctaggcaagccttaggtaattaatggtcttaaaattgtgaagttgtgctatgtttataaactgctcaggtttaacaggttttaaaattagtaggcagactgattaggattctgtcacttcgcttaaaaaacaatgatgcatattctgtgtttgtgatgcttacctagatatcctgttctaggaccttctaaaatcctttaaaatttgttgtttgagacgtgctacttatttgtttatgtgtggaggtaaacatgatcccccttaattgctcttctgtttgacagtcctatatgttatttgttgtcgcttagattttaccttttaagaaccttaggcggggctagaactgcctaagtctataggtcctaaacacctccaggaccacaaggaaaggacgggtaaagcacgcttagagttcgttaattaaactcgcttatataacagctaagggaagggtaacaggtagaaaaagatatgatgacctgtgcgctaattccacatgtagcctctctaattgaggagtgattaccgggcattgtacaaatatgatcctataggctaaccaacctaggacttcccttattccttttacatatgtgtgcttagactgcttatctgtcaaaagtcttttattcttttacatatgtgtgcttagactgcttatctgctaattgactaattcacaaagtaagtttggtcgggacccaccgttgtggacctcgaggggtgcctaacaccttctcctctaagtaatttcaatcccttacccaatctctggtagcaaattggttctatgagttacttgtaatatgtgccctaacacaccttaattcgttaggtggcgactcttcaacttcttgtacccctttttccaaaaaggaaatgacttgtcccaataataacccgtactccgcgaggaaaaagggggcacgacagcatgacaactgtgctggggactttctaggcttttaccataacaaattgccttatgaattagtctgaacatgccttactttgttaatacctgcaccctttccctttcctctttatgtgaacttcactgtttattttcgagtatttgttttctcaatatgaaactaacttgtttctttgttttccttcttaactgttttcaattataactgctgtatttatcgcttttcataacgtgcaaatacgtgacaacatgttatttattactgcataaatcatgctcaacatcatattctactcgtgcctaaacaaatcctatagcaacgcttgatgagtggttgcgctcttccaatttattaccctttaaattcggaaaggattatttgcggtaaaactagtcgatcagcagtgcagtcgacagttctgtgcctttccccctcaagttttctgcttgagggtaccagtctagacccccatagtaaccttactcttattattgtgcatgcatcatggtcaaacctagtcgggttaatgtgttgtccatataataaccctttaagacaagccttatccaaagtccaccggggtttccacaatctcaacggacgcaaccacgttctgtgcattaatttggagaactaaatgctaatatcctaatcatgagtgtataaatagtcaaatatggtggggaagaaaggcctaaccttttgttttgcagaaaatgaggcatgaggtccccaggttcggcatggtccgtagcatttcaccaatgctactagactggtgggaagacctttcctctagtgacaggaaacacgtgaggaaacacttgggcaatttaccttctctgctagacattcagccgaacaatatgctgattgaagctgcaactctattttgggacagtgagagggttgtgttccgcttcgggaatatcgaaatgacaccactcttggaagaaattggaggacttgttggactgacttgggatagccctgggctattggtacttgagaaccgcacgggtaaagggtttataaagatgatggggttgaagaaaactgttgaactagagtgcctgaaaaagtcctacatacctttcgaatacttgtatgaaagatacggtcatagcaaatcgtaccatacctaccatgacgagttttctatcacttctctgggtcacatccaccgtagagtgttcgtgtttattgtgtgccttttgggcctgatagtgttcccgatgaaaagggaaataatccatactagactagccatggtcgccaagactttgatggaagggatcgatggacaaacatacactattgtccctatgatcttagctgacatctaatcggctttagagcgatgtcaaagagggatcaagcattttgagggttgtaatctttgctgcagttatggttattagaacatcttcaaaggggccagtatcaccaataacttccgcgaagggcttggaacgaccacatttccttccatcaccccaagcggatgacttacattccggacaggtttgctcagtcggagagtgacaaagagtgggtggagttcttcgacaatatgaccgaggaacaagtgcaatggatgtttgaatggttcccaatagaagagttcatcatcctgtccagggacgctccacacttggtgctgattgggttgaggggaatatacccttatgttcctatccgagtcatgaggcaagcatgcaggaagaaggttgtaccaagggttgcgaagatgggtcacttcagagcagacttttaggatgatgacatcccttacaagtgtcaagatcagcacatgtggcactacaagatcagcgtggagaaaaacactattgagacagacatgtatcacgctgggtgtacacctctctacccgacatggttgaaggacaacttaggggggatagtgaggccaggagtcagtcgtggaaataggatcatagatgaagatgctgaggctcaggttaaatataacaaactgcgcaagagggtccatgatttcgagaatgagaaccgggaaatacatgagaccgataggaggctgatcgaggaatagaaggaaatggctattacttccaacagaaggctggaatatctggagcgaggtttagtggatttggagggcaaagtcataaagaggattgaggattgctagaagctgaagggagcgagggtggacacttgtctagagcctatctgctgctgggtctgcgcgagttgggaaacctgtttgatggagtcaagaagatcgaatctggggaaggtccttctgggaccattacttttgctttcataaatgtaataaggccaagtgccattagtgacttattttctattgttatttagagattcgtctattttatattaacgaaatgaggcatctaaattctccaaaacaatttgttgttaggcctacctcgggtacaacgaggctcccaaattaggacacgaatttacaattctgcaatatgtgtttaaatactgcaagtactcttatcagaatcctcactgacttggctacttttgtttttattttatttcatttgattatgacaattccccaaaggttggttcgtgtatactgacatcatcagcatatcatacaagatccaggggccttccaccctctcctcctcctagtccaccaaaaggcaagggaaaagcgaagatggaagacttgaacaacatcataaaagaaaacactacaccagttgaacatccagaggcttctgacagtcaaggtactcaggttccgaatgatgttgtttcgcaactcgaacaaagaatactgaaactctaaggagaacttgagcatgttcggaacatagcaaacttgtccttctctctcaacgtcccagatgccagtcatccaaacactcagaaccccgcaccacctcaaaatacacccaacaatcacccaaaaaatcctcctgcacctcaccactacacaaatccaccacaaaatcaaaccatcccaccacaataccagcaaaacacctgtcacactccacgaaacaccccaccagtcattcctgaaccccaaaattccaccaatgatcatcactatgctcaagctccaggccaccagaacaaccccatatacgtggagaccctacctcactccactcaacccatctcttatactctagaatccagtgagaaggacatgctcatcaagaacctggccgaggaactcaagaagttgactagccgagttcaaggcattgaagaaggcaaggggatagaaggtttgaactatgaagacctgtgcatacagccgtatgtaaaactgtcagagggttacaaacctcccaagttcgagatgcttgatggtacaggtgatcccagggttcacttgaggacctattccgacaagctagtcggggtcggaagagatgagaagatccggatgaaactctttatgaggagttttacaggggatgccttgtcctagtacatcatccaggatcctaagaagtggtccaactgggtgagtatggcatcggatttcatggatcgattcaggttcaacacggagaatgcaccaggcgtcttttacgttcagaatctcaagaagaaacctacttaaactttccgtgagtatgccactcataggagatcggaagtagccaaagtcaggtcggcgttggacaaagagtagatgaacaagttcttcgtcagggcataggactcgcagtactatgaaataatgatggttattcaaaatcacaagttctctgacatcatcaaacttggtgaaatgatcgaagatggcatcaagagagggatggttacaaattttgaggcactgtaatccaccaacaaagcactgcagtccggtggtatatctaagaagaaggacataggagcggtaatggttgcacaaggacccaaaactccactaatgtattaaacctccccattcacgtaccaatcacctccacctacatataaaccatcacctccacctacatatcaaccagcacatctgtctacatatcaaccatcatctcctagatattccaaaccagctactgtctaccacacctataattcccaaccatcccactttcagccaccctaacccgtcaaaactacctaaggcctcgacctaacttcgaccgcaaaccacccaaacagtatactgccattgctgaacccatcgaccagctgtatgaaaggttgaaagctgctggttagtcactcccatccctgctgtggccacagaaaattcatcccagtgggtcaatccaaacaaaacttgtgcataccattctggcatgaaaggacataccatcgacgagtgccgcacattgaatgacaaaatccaggctttgattgacaacaagatcatccaggcaaaggaggttgcgcctaatgtccgcaataaccccctcccagatcataggggtgaaggcgtcaatatgatagagatggatgaagaatgggatccggagggatcaatcgggctaatcaaagagggtgatgatcctaagaagaccgcagttacactcaatcccattatagaacagatacagccaccaggagaggttgaggtaaccacatcagtcccattcgaggttgaagtagcaccacctacagacacgcctgtaccatttgaggttgaagtagcactacctgcagtggaacctattccatttaaagtaaaggtagccacaccacttacagtaacagtgtcaaccacaccgcctttcgacaccaaggttgtgccctgggattatgtagctgaagctaggagaagaggaaagactaaaatagaaaaagctggtgttgtacaaggtatgactaagaccggaagggtctacacacctgagaatttgggagaatccagcaaacaagcctctaacagagctcccttcattgaaacaagcccatatgacctctagaggaaagtacaagcaagggagtactcagtcatagaccatctgaacaagactcctgctcagatatctatcttgtcactgctgcagaattcagaatcacataggagcgctctaatgaaagtattgaatgaaacatatgttcccaataacatcacgagtggagaaatgactaatatggtggggcaagtactggaaagtcacaagatcactttccacgaggatgcgttgccactgaaggtttgagtcacaataaggcactacatataacagtgcaatgcgaagtctacttcattaccagggtcctgatcaacggaggatccagccttaatatttgcccattgacaacactgaagaggttgggcaaaggcttgtatgaaatccgagaggggaccatgaacgtgaagtcatttgacgggtctcagagggacaccatcggggaaatcaatctctccctacagatggggcctacatggtttgatgtcaagtttcaggtactagacatatctgcatcctacaacctgttattgggacgaccatggatacatgctgctggagctgtgacatcaactttgcatcaggcggtaaagtttgattggaatcatcaggagatgattatccatggagatggaagaaaccccatttacaaccgtcaaactatcccagtggttgagaatagaagaagactcgctggggaaacttatcatcacatcgagcgggtcaatgcaatcgacaaagataagtggtgggacaggaagatagcaagtatgatgtattggagtgggtatgaacctagcaagggtctcgacaagaatcttcagggcatttccaagccaatacagttgaagcgtcatgacactacttttggcctgggatatcagtacacttggcaagggtacaatgactggtcgccaccatggcgcgatccttactatccacttgagcagcttgtaccgcatttgaatcagaccttccaacaggccaacatcttatgtggttcggaagaggaagaagcactggcggccttaaggaacctgttcctggaggatgaagacatggaatgttgtgtaatcgtcgaggaggaggaggaggaaggccctaccatccaagctgtgggaaaaggatcattcctcataaattggactgtcagaccatccagggcccaacgagtcccgggcattactatttcctgtcttgatgaaccgacgactgtgacatgtaatgagacaacgcaacaaaaggatagtgatttagaggaagaagatgtcatacctgaggaaattgtcaaagaagtagaagattgtaagaacaagcctaagtccaatctggacgaaactaaagtaatcaacttgggaaattctggaaatgtcaaagagaccagcatcagtatccacttctcgccgtcaggaaaagaagagtacacaaaattcttgaaggaatatgaggacatatttgcatggtcgtacgatgatatggccgggttaagtatatccattgtggctcacaaattgcccacaaaccagtgtgtccaccaatgaagcagaaactcaagaagttcaagcctgacatgagtctgaaaatcaaggaggaggttactaagaaaatcaaggccaaggtcctcagggtggttgaatatccaacatggttagccaatatcgtgtcggtttcgaagaaggatggaaaggtcagggtttgtgtcgattattgggatctcaatagagcaagtccaaaagatgatttcccgctcccaaacatacacatcttaatcgacaactgtgccaaatatgaacttcagtcatttttggattgttttgccggttatcatcagatctagatggacgaggaggacgctaagaaaacagctttcattacaccatggggagtgtactgttacaagatgatgccattcggtctaaacaatgctggggccacctgcataagggctatgactaccatctttcatgacatgatacataagtagatcgaggtgtatgtggacgacgtcatcattaaatcaaagaaagccatagatcatatagcagatttgaggaagttcttcgacagactgcggaaatacaacttgaaactaaatcccacaaaatatgcattcggggttcctgccggaaagtttcttgggttcatcgtcagccgccgagggatagaactggatccatcaaaagtcaaagccatccaagagctgccaccgccaaagagtaagaaggatgtaatgagtttcctgggacgactaaattacatcagccggttcatagcccagtccacaattatatatgagcccatttttcaagatgttgaagaaagatgttgcaactagttggaccgaagattgtcaaaaggttttcgaaaggatcaaggagtacttatcaacaccaccagtcttggtccctccagagccaggtagaccattgctactctaccttgcattattagatggagccttcggctgcgttttggggaagcacaacgagacaggaagaaaagaacaagttatctattacctgagcaagaagttcactccatatgaagcgcggtattctctgctagaacgtacctgctgcgctctgacctggatagcttagaagctaagacattacttctatgcctatacaacatacctcatatcaaggatggatcccttatagtatatctttcataaacccatgcccactggaaatctggctaagtggcaagtcctactgagtgaactcgatattgtttatgtaactcagaacgcggtcaagggacaggcactagaagatcatcttgttgaaaatcttgtgtaaggagaatacgaacccctgaaaacgtattttcccgatgaagaggtactattcataggagaagacatcgctgaatcctatgacggtaggaggatgttctttgacggagcggaaaaatttcaaagaagtcggtatcagagctttcttagaatcggaaactggccatcattatccggtatctgctaaactcagatttctttgcaccaacaacatggcagagtatgaagcctacatcctagggctcaacatggccatcaacatgaatattcaggagctgctggtaatcggtgattcagattttcttgtgcaccaggtacaaggagaataggccaccaagaattccaagatattgccatatctgcaccatgtgcaggaattgagaaagaggttcacgaagatagagtttcggcatgttcccaggattcagaacgagtttgccgatgcattggccattttgtcatccatgatacaacatacagaaaagaacttcattgatcctctcccagtaaggatccatagccaaccagcatattgtgcccgtgttgaagaagaaacagacgggaagccttagttccacgatattaaggaatatttggcaaaaggggaatacccggagcatgcgaatcatactcagaagtgtacacttcggaggttttccaacagcttcttccacagcggaggaaccctgtacaaaagaactcctgatttgggattactaaggtgtgtcgatgcaaaagaagcttctaaactacttgaggagatacatgttgggacttgcggcccgcatatgaatggctttgtcttggccaagaagatacttaggaccggttatttctggatgattttggagatagattgcatccactatgtccataaatgctaccaatgtcaagtacatgcagacatgataaaggtgccaccaaatgagctcaatgcaactagctaaccttggccattcgccgcctggggggatggatgccattggtccaatcgagcccaccgcctcaagtgggcaccaattcatcctggtagctattgattacttcaccaaatggtcaaagcagcatcttacaaggcagtgactaagaaagtcgtggcagattttgtccgcgaccggattgtttgtcggtttggagttccggaatcaatcatcactggcaatgcctctaacctcaatagtgatctgatgaaggccatgtgtgagaccttcaaaatcaaacacaagaattctacaacctatagaactcaaatgaacggagctgtagaagctgccaacaagaatatcaagaagatactgagaaagatggtagaaaatcacaaacaatggcacgagaagctgccattcgctttattgggatatcgtaccacaatccgcacatcaaccggggcaactccctacttgctggtttatggtaccgaagctgttattcctgctgaagtggagattccttccttgagaatcatacaagaagttgagctcagcgatgcagaatggataaatagtcgttatgagcaattggccctcatagatgaaaaaaggatgaatgcagtgtgtcacaggcaactctatcagaacaggatgtccagatccttcaacaaaagagtcaagccgagatacttcacaccgggtagctggtgttgaagaatatttttccgcaccaggatgaagccaaagggaaattctctcccaattggcaaggtccttacatggttcatagagtattgataggaggatctctcatacttgtagagatggacagagaagtctggccaaaatcgatcaactcagatgcaatcaagcgatactacgtgtaactcttttgctttcctcaaatgatgtaaattgaactacgctcgacctaattcccgtttaagaggggatacataggcagccctatgggttcggtcataattcaataaaaaaacttattcccccccaatcagaaactggggcagaattttgaggaggaccctcaaaattctgaagcaagttcagccgatcgcagcatgtgcaacagtcagagacgccaattcatctaactggggcagaattttgaggaggacccttaaaattccataacataagaggttgcaatgtcttggagcgtgtcacagtcactggttcatctaaccagtttctaaaataaataatttactatgtcttcgaaaactatgcatgcctgcctgtaaaataactttgtttagccaacgttatcccaatgatttgaacaggatctttagactgagcaagcaagtcaagcaagccaacggaggaacgaaccgacctccccctttacagaactcacgatttttctttggatgcaggaacgaggaatatacatgtctcgaagtcacaatcttcataacaaccgcgatactgaaatctactaccagctaagaaaactctgccatcatgtgctatttattctattttttctgcatgggactaagccctgtcccgcatcctgaatgggactaagccctgtcccgcatccgcatgaggctaatccctgcctccatatcttgcatgagactaaactctgtctctatgaggttaagctctacctccgcatctgctaagccctgcctccatatcttgcataaggctaagttctgccttcacttgcatgggactaagccctgtcccgaatcttgcatgggactaagccctgtcccgcatcttgcatgagactaagctctatctccatcttgcatgaggttaagatctacctccacacttgcatgagtctaagccctgcctccatatctgcataagtctaagctctgccttcatctgcatgggactaagccctgtcccgcatcttgcatgaggttaaattctacctccacacttgcatgaggctaagccctgcctccatatctgcataaggctaagctctgccttcatctagcatgggactaagccctgtctcgcatacttgcatgaggctaagctttgcctccaatttttatttattgatgaaaactttcacaattcaggccaagcctttcacaacactttcatttcaacaattgtaaatagaaaatgatataactcataaactttctcaaatatcatttcacaataaaaccaaccagaacatatgtaaataccgtaacgctgtcatccaattcaatatttatgtaccataaccaaatcaagggaacaaccaacatttttagcatacttgtaacaatacttggcaataatttaatggaaccaaataaccatgtaaacctcaatatcataaaacagttaagctaggaagaaaataaatgggaaacggggaagggatcatgttaaacaaccaatttagtaatgcataggtacccgtcacctcacctatacaccacacacaagaaaatttcacataacaatcaggttgggtattcccattccctcaagtcaaggttaaaccaagcacttacctcgatctcacaagcaattcactgctctagcattgcctttcctttagaatttgctcctaatccgctcgaatctaatcacaattggttcaatgttattaatcatagcctaaaggaatcaactttgttgaaaaacaatggttctcctatgttttcctatccaaattcaaaaatcgacctcgggcccgcttggtctaaactcgaggttcggaccaaaacccatttacccaatctccctcgagcctagatacgcaattggtattggtatccgacctcaattcaaggtccaattccccaaaatttgaaattcctaaagttctacccaaaaccccaatttttaccatgaaaactctagaattttggttgtaatcttgttaaaagttgttaggaattgaaaaggattagttgaagatcacttacctatggtttggagtagtttggtctttggaaaatcgcctatggaggtttagggtttgagagaattgaaaaagaagtgaaaaactcgtccaaaatctgtatatcaggttgcgggtctcacatttgcgaaccctgagttttatgaaaattatcacaaatgcgataaaaaatgggtgtttcgcatttgcgacccaagatctcgcaaatgcgagatctgaggctggccattgactttgcaaatcaaagcccgatctcgcatttgcgagatctgaggcctacaacaccagatgttcagttgttgggtatttttctaagtctagacactccgtagcctacccgaaactcacccgagccctcgaggctccaaaccaaacatgcacgcaagtctaaaaacatcattcgaacttgctcgtgcgatcaaatcatcaaaataacatcaaaatctacagatttaacctcaaaactcaagattttctcaagaacactcaaatttcttcaactggatgtccgaattacatcaaatcaactccgattctcatgaaatttcacatataggacttcaataacataacaaacttgttacgggctccggaaccaaaatacgggtccgatatcatcaatttcacatattatttcatttctttatttcttgaattaaccagctgaataattttcttcaaaaattattttctaaggctagggacctcagaattcaatttcgggcatacatccaagtcccatattttactgcggaccctccgggatcgtcagaacacaaattcgggtccgtttatcaaaaatattgaccaaagtcaactaaaatcaaattttaactctagaaattattatttctcatatttttacgtaaaagctttccgatttcactactacgcacgcggatcgaggtgattaaaatttatatttttgtggctaataagcctagaattaggtctgatttcatagaatgaccccttgggtcttcacggtatctagtctaacctcgaagaagtagtgacgagggattgacttcaacacttactatgggccaacaatataaaataatatgaaattcgaattaaacatgattatgtaaatgtcaatggaacatcagagcaagaaataaatgaataatcttttcacagttagtggagaactaaagcatttccctcattcacctatttaacctctcaagccaatgaaacaatatcaaatataataatgtttccagtattatcatgcacgaattatgccgaggacatacggcccgatccaaatatacataaacataaactgtgtgcactaccgagggtcgaacgacacagaccatagatgcatctattaacctgctgaggcgaacgacgcgcacccatgagactagtggaaatttaccccgctcgcggaatatacttgcgacgcggttgaacatagatttttcaagttatcatagtatccctcaattatttccaaaataagaaattcaactagaaactcttaaaatgttgaaatcctcaacctcaactctattcaagacaactaataagcataatcaaataacggtgtcaacaaaacatggtgaaacctaaaactacccgaacataagcctgaatagtagctacatacggactcttgtcacctcctgtgtatgtagcccccacaaatagaagcacatattaattaagttcacccatggggttaatttcgtcttacaaggtaagaaaagagacttaccttgtctcaagcctactttccgatccaagatttatgctcaaaccctccatctggtgccaaacgaatcgaaactagtcagatgttatataaaatagtcaatataggctcaaaagttcatattttaactattaacgtagctacccaaccccaattgaagaattcccaaaattcacccccgggccgacgtgctcggattccagaaattttgaaagaaaattgttacccataacctcatgaagtcaaatatatgattttcaccaaattccataaccattttcgtggtcaaatcccattttgatccaaacctaggtttttcatctaaacccttgatttcaccaatttttacgtattaatctacccctaatctatgtatttaactcatgttgagtagaaattacttacctcaaagtgctaggtgaaaaacgtcttccaagagttccaaaaatcgcccaagagatgaaagaaatgagctaaatggactaagtcccgcatttaataaagttgtgcacaagtctcatatgccgcaatttgcgacaattggttcgcaaatgcgacaaaaagcaaatgcgaactggctcccactggactcgcaaatgtgaaccctgtcaaggttgcaaatgcgagttatgcccagatcagacttcttcgcaaatgcgaagcctttctcacaaatgcaaggtttgcaaatgcgaactatttctcgcatttgcgacacctgcaggaggaggaaagaaacaccagaaaactgaagcgtcatccctctaaacatgtctgaaactcacccgatccctcggggcaccacacccaacatccacacaagtctaaaaatatcataagaactcgctcgcgcgatcgaagcaccgaaatgacatcaaaatccatgaatcgaacccaaaacgtatggattaactcatgaactcaaaaaattcttaaatacttcggcgcgtatgataatcaactcagaataatgccaaattttgcgtgcaagtcttaaatgacattacagaactatttggacctcgatatcaccaaacgctattccaaaccaaattcaaagaacttcaaaaaccttcaaagagccaactttcactattaggcgccgaaacgctctcgggtcatccaaaacccaatccgaacatactctcaagtccgaaatcatcatacgaacctattcgaaccgtaaaatcccgtttccgaggtcgtttactcaaaaatttgaccggagtcaaacttagactttctagccaatcttaaggagccaagttttccgatttcaacccgaacccctccaaataccaaactaatcatccccgcaagtcataaaatagtaaaagcacatacgaggattcttatttaggggaacaaggttttaaaaagaaaaatgaccggtcagatcgttacaaccagcgtatacatcaattgatcttagtgatcaaagtatgtgtcaaaactttagtccttgatcaaagtatgtgtcaaaaccatagggactaagggtgtgtttggtataacgaaaacaaaatttcgtggaaaatattttcttgaaaaacaagtagtaatcttactcattttctggtgtttgatacgcaaattaaggaaaataacttctcaagagtattcataaattataatttagatacaataaacatgaagtcataaaattttgaaccaataaccttccgaacccaaaaaatttgtaacttttggacccctaaactttctaacttgtaaactctataatttttaaattcgcaaacttccaaaaacctaaaccgccgaactcataactttagaacttgtacaatttctaacatgtaaactgaaaaatgaaaaaaccagaagtgaaaatataaataaaaaatatctttgccacgaggaggggggcgggggaggtattggcggggttgggagggtgggtggtgtagaaaaacgtaaaaaatagaaaattgaagttggagacggttggggttagatgtgagggtaggtggagtttttcgaaaatgttttcctaactttttctagggaagtcattttcctcaaattttaggaaagtgtgatatctaggaagatattttccaactattttgtgcaaccaaacagtggaaaatgggaaaagaatttccgaaaagtattttccgtcataccaaacacaccctaagtgaaacctcaatttccttagtcttagagttactaagtacaatcaaacctctctataataaccttgtttgtttcagatatttgtggatgttatagcgaattgctgttatagaaaatatatattataacagaaaataaaatttgattccaaaaaaacttggcttttatagtgaagtgttgttatagagaattgctgtacctattctgtaacgacctgaccatccgttttgagtatttatgctcctttcaattatttgaagttttgaataacttcatatgatgtattatgacgtgtgtgaatggttggttttgattttcaagtgtttcgggattagttcggaaaaatgaattttatgttggaagcttaaatgagaagggttaaccggagtttgacttttgatcaaacaactcagtaatggagttttgatggttccaatagttccgtatgatgatttctgacttaggagtgtgtctagatatttatttggaagtccgtagttaaattaggcttgaaatggcgaaaataggaatttgaaagttggaagtttgaccgggggttgactttttgatatcggggtcggaatccgatttcaaaaattggaacatctttgttatgtcatttatgacttgtacacaaaatttgagttcattccaggttgtaaactgtaatttcataccagtcatattcattcattgcatatcatatcttagactcagttgttatttatgatacatcatatcatcattttgggctagttttatgacattgtgatcccgagagaatgagagattgatgactaagtgaggccaaaggcctaattatgaggataattatgggatcgggttgcacgctgtaacattctagcttggcttattatagcacatgagttgtccgtgcaacacgtgagttgtccgtgcggatccaaatattgatactaaagcacgtgagttgtccatgcagattatagcgatttgctgaagaagcccctccggagtctgtgcacactcccagtgagcgcaggtacctactgaatgcgagtgtcgagcgattgggagtattgagtgactatgaggacagagtgacttggaggactgggtgaaatgatactctgagagtatgcatatggtttatcactgagttgtatcgcatttgacttacaggcataaagatgcattttttctcatgctgtacggtatcacgtcattcatgacttctcatatacattgacatgtaggcaaaaagatatattttcctcatgccatttaaaaataaaatatttacctgttgaaagtttttggaaaaaacacagttttcaaacttactcataaattggtgatttcggtaacggatttggattttcactgatatatttgaaaaacaagtctatttttctagaactgtgaacgagctgagcaatttatctctgagctatttcttttattacttctattatgttgttatgaattgttgttggctattggtgttggatccccgcctgtgttccagctcgtcactactttcaacctaaggttaggtttgttacttattgagtacatgaggtcggttgtactcatactacgcttctgcaccttgcgtgcagatattggatgttgattttgctgtgatcgacgggagctggatttgaagacgtacccgcgttccggtcgtagctgcctcttgttcatggtagccttagatttataaaaatatgtttatgtacatttcgaacagatgatgtatttatttcataccagctttgtaaattctaatctcagaagctcatgatttgtactatcagttcttgggaagttcttgtataaaagtagttttattattatttattttcttaataaatctcattaagttggatagttgttaatttatttacctgacggctttggttaggtatcatcacgactatgtaagtttgggtctattcagtggaataatcggattgcatgcaagttgaaaaactataattataaaaaataaaatatagactagttttggctagatgttaagtttggacttattttggatattttcataagattctctcactttaaatataatatttattttaattattatttaaattttattgtatcatatttataaatcctttattatataaggatgaaaagtgtgcaacgaccaatctgatgctaccttatttctttttctctcatcccttatccggcctttaaaatttttaagtcacaatccaaacaaattttatatttagaataataatacaatataccatccaaagttccaaacaagttgtaaaacggaataagaattattcagtgcaactttgatcagaacgcgctccattaccataagattcgtagacagtgactgacgatttttcatcttctttgcacttgctttagtctctatatattgtttcttcctaaaaaccgaaaattagtgcaaaaattgacaattaatggcaactctaggaggaattcgtgaggcaggaggatctgagaacagccttgagatcaatgatcttgctcgctttgctgttgatgaacacaacaagaaacaggtccctcttttttcatttttgcttattctcaaataaggagttaatattttgtttttcctctttttaccctcttctttgtgaatttcttggagctagagttgtcaaatttggcccaaatccaaatgatccgcccaaccagctcaaggttgggctggttattgacctatccatttaataaaaatagcacgagctagccagttttcggactggtcattcaaaaatagtcagtatttgtccaatcattgaaaaatagccactattttgctgcaacagagaccggtccaacataatatactggagttcggtgcacttccaccatattacgctggaactccaacgcgcagaatgttccagcataatatactggagattcgaacacctgtgtatgaacttccaacatattatgctgaatcattatactttgctggaactttagtataatatactagagttccagtatatttatgttggaactccagtataaatatgacaaggtgagttgcgctaatggtaaacaccctctaattccaaccaagaggttgtgagttcgagtcacccaagagcaaggtggggaattcttggagggaaggatgccgagggtctattggaaacaacttctctaccctatggcaggggtaaggcgagtatttttcagattttgaacagcgttttcgttcagatttatctttacatgaaaagtgactaaatttcaattacctttgaaactatgactatttttgaatgaccacttgtgaatctggctatttttgaatgaactcagctcatcgcgaaaataacacggaatgctaaatagacagcatttgcaaagtcattgaaaaatagtcactattttgctgaaataaggaaggttccaacataatatgcggaattacgaagcttctgcgtataaaattctagcatattatgttggaaagtgctatatacatagctccttgattacttatcaaataaaatgaacattctttaagaactttttctcccgatcttattagcttaataacatggaagtcacaatagttctagcagagtccagcgcacggaaagcttcagcatattgtgttggattatggagttcatgtgcataaatttacagcatattatgttggaactcacacacattatgaaactccagcacattatgttggaatctcatgtgtaaaaaattcaaactccagcatgttatgctggaatttttccggatttttaagggtttttgttcagtttttatctttacatgataaagtgctaaattttgattacttttaaaactgtgggtattttcaattatcaaatgtaaatatgactatgtctgattttttctcctttatctcattccaattaaagttgggttgatttttagcccaaattgattcatgagtaactttgctataatatcttaaaaataatttttttcgtttgatatgttatatatgaccatagcaaaagaaaaatagtcttatttagtaattatactagaaaataacacatcttagttaaaacttggtaagaattttgctggttgggctatgacccaaattttagcccatcttgactcagcccaagtaactttagggcgggttattaactcaactcattttgacccgtccaaaatcaatccaacctgactatttgactcccctagttggagctgacctttgttgattgtggaattgattgtgtttgttcctcttatttttaagtagggttgcaatgtgtttgtcaaatctttgctagtgtctctgtgattaagcatgtataggggacaacctttatcttctttgcgcttcgctacgactgagattgattgcttcatcactcacgggccacttttcttgctttttgaacaacgttctatatcagaatgcacttctggagttcggaaaggttgttaatgtgaaggaacaagtggttgctggaaccatgtactatataacactggaggcaactgaaggtggtaagaagaaagcatacgaaaccaaggtctgggtgaagccgtggcagaacttcaagcaagttgaagacttcaagcttattggggatgccactagtgcttaaaaactgctaaatgaatgcctcttatgtttgtgaaaaataaaggtaacatattttagcttgccagtatttgaatatcgtaaagtaagcttttaactatgccgtagtgttaagctacagggatctgtaactttacaatgttccatgttttgatattatatggtcctccatatgatagttctatgctttatcttgtatatgtactgcatttctattgctagtatatatttgagaagcataagcaattgccatttttcctgagctttgcgtgtagtaggtcaacggccagcataaaaatagttataacgaatcttcatattaatgaatgcattcaggtccctactaaaagtttcaacgaacatggataattgtttcttcaagctgttttctttgctttggtgtagtatactcgacatttggtttctaaatgcttttcaataggaaggggagacttggagcaacggtaaagttgtctctatgtcacctataggtcacgggttcgagccatggaagcgaccactaatgcttgcattaagatagattgtctataatacacccttggggagcgatccttccccgaaccctgtataaatgcgaggtgctttgtgcacctggctgccactagcacttggtgtagttaatgcttgtttctactatttctttcttccttcctgagccgaggttttattggaaacaacctgtctaccctcccacggtaggggtaaggtctgcgtatacactaccctccccagatatataatcatcatgaatttttgattgggctggattgatcgaaattttcataattcattctttttcttatgttggcgtgaggatgtcgatatacttcttttgtgcttattatcctgacattgcaggttttagacattcagtacaacaaactacagaaatgctaaaaactcatttgtagcacagttttgattttcacagttttattcggtttttctggctatacgaaatgtttattcttccacctccgtgccatccatgaacgcgataattagagcgggggaatgaaaacatataattaaagacctttccagttgtgagtttggtaacatagtgttacagtcttgatactgttgaatagtttacattgtttttctctagtcaaaataataaagttgatttggccagtaattgtattgtagtcatcagtatggagttcttaaattggccgatagtaggcagagatcattctgctaaaaattatcctataaatctctccaaggaaggagctacaacaggcaaagggtggttgcaaaggatggtcagttgaccatctttcgcttttgctggaaaattattgtatgtacaggttaaatatatacattcttaacgaaattcttggtttcgccatcattgctaacagagtagtggtatgtgatgttgatatgtagagagaattaggtaaaggaaaggctctttgttgctacaccagaaatacatagtatgacatgccatggagtagtatgatactccctccctttcaatttatgtgaaccatttgactgggcacggagtttaagaaaagagagaacacttttgaacttgtggtataaaatgaggcacatatattttgtgtgactataaatcattgtataaaggtaaatattcttcttggcacgaactaaaaaggaaatatgttcacataaattgaaacggagggagtattagattagtaaagaacaaggaaaaagaaaaaacacttattgatatgcaagaattggagtaaaaagttttaaattcttaaaacaaatatggatcatcaagataaagaaaatggtgcataagctatcaacggtttgtgaagtatgaagtagatgagcctccatcctttaacttccaataactatagaatccagcaataacattcggcaaacaaccagacgcggatctagaatttgaagtttattagttcctgcaatgatctcaagttaatatacaacaataactgggatcaaagtcaaatatttatagttattttagaatttcttagtacatatatagagtctgagcaaaagctattgtgttcacgtgaacccgtaactttcatgctacatccgcctacgttgaacagctactgatatggtcaaatgctactgaactttataacttttttctttcaaaatgaatatgaaattaaagtacctgatgtcacgtcgtaaggtcgttcgataacatgaagaaagcttctgtttgatctttttcaatgctgctacaacattagtcatgttcatcctttcagctgcaatattagctgtgcaattcatggctaactccatgattgatgatacacattgcagcttttgacttaagttttcttcatctagtgttagtaagtcggcatctatgattttattcagctcatccggaagcgaattatgcacgtagcttctcaaattcaaatctcccgcgaacatttcatcattaggtttcttctttgtatagatttctagcaacatgataccataactataaacatcagacctcttggatacaaggccttccaaaccatactctaaaaaaagaaaaaagaaaaaaatatgtcagcaagtaaacttataacgcgttaatcaattacattccattattttatctcttttcaactatgctgtgaatttgcttttcttgagccgaggggctatcggaaatcagtagggtagccacatgtattgaaggatggtcaaccgaacaccctttatcgaaattttttactgtatatatagaaacatatattgtctatataggtcaaaaaaatatttttttaatgtgtatattaaaatttgaaacccctttgcaaaattcctggtttcgccacagttgaaaacaacttttctaccttcacaaggtaggggtaaggctgcatccacactaccctctccaaacccaacttgtgggattagactgttgttgtcgttgttgttgttgagttaatcaattacattgttacaaagttaattaaagaatttacctggagcaatgtaaccaattgtggcaaaggttgtagtgtgagcaatggattcttccttagttaaaagtttggcaatgccaaagtcagttaggtgtcccaccatatcattgtcaagtaacacattgctaggcttcagatcacagtgaataactggtactgagtaaccatgatggagatattccagagcagatgcaacatcaaccatgatattcaatctctgcattatatttaaacaataatctcgcgaatgtagcaacttgtctaagctctcatttggcaggtactcaagtatcagtgctttaaaatccaagttacaacaactgcttatgatcttggtgagatttctgtgacgaagggttcgcaagaattcacattctctgtcaaaagtttgatatgtaacttccatctgcacattaaaaactttgacagctactatcatcccatctgccaatatccctttgtaaacagaaccaaaacttccactacctatcaagttatttccatcaaatccctgagttgctctttgaagttcatagtaagaaattctttgtggcgctatctcaggcgaccactcatctttagcattgactgttttaccccgacgtctcttcaatatgaaaactattgatgaaacaacaacccctattacaaagataaccaaagaggcaactacaatccatatcaatcctcttttctttgaattagaaggacaagccgggacatgcttttgagggttaccacataatcctttattcgacatgaaagattggaaaggaagatggacaaaaggtcctccactcggaatttccccctgtaacctattgaatgaaacattaaaggagtgtagttgctgaagtgcctctaatgactttggaatcacaccagacatgttgttatatgaaagatccaatgcttccaaatttacgagttttccaaatgtctcaggaattgatccttcaatgttgttatgagccaaagatagttgagtcactttcaatagacttcctaatgtatttggtatgtttccagataattgattccaagaaagatccagaagtattgcagcgtcgagatttccaaattcaagtggtagagagccattgaagaaattagaggacaagttcaacttcaagatgtctttgagattccaaagagttaaaggtatgttagctgtgaagttatttgaatcaagataaacttcccttaatgaagtcaaatcccctaaacatgtaggaatacttccccacatttgattttgtgaaagttttagaaaaaacaagctagatagctcacacaaaccatttggaaaaggaccacttattctatttacacctaatgaaagttgttgaaggtttgtcaaagaacctatcgtcatcgggacaatgccagtaaagtcgttgtcttctagctctaaagaagataaatttatcaaatttccaatttcatttggaatatggcccttgagattacaacctatcgccgaaaaccattgaagagaaagattgccaatagactttggaagcaatgcatttaggggattgaaagataacctcaaatctactaagtttaccaaaggagtaataaagctcagtgttgaagtttcaccaataaatgaattgctttgtaattggagaacttcaagaagtcttaagtttactagagatttaggaatggaacctgtaagttcatttccacctagttcaagagctgtaagcgtagacatatttgagatggaacttggtaaaataccattaatattgttttcacctagaaatattccttcaatattaggtaaaccatggcctatagtggaaggaagattacctgaaatgtggttatttgataatgaaagagatacaagagttgagatattaaagataccattagggatagaaccactaaagttattcaaatacaatgaaaggtcctccaactcttgaaggttactaagttcatctggaattacacctgcaaaaggtaaaggtgaaagaaaagaactgtcatatttttccagagtcttcgtgtggctaataggtcacggggttgagccgtggaagcagcctttaatgcttgcattaaggtaggctgtctataagttgctcggacttgagtgcggatatccgatacggggacggatccgagtatcggattcagcaaaatctaaattttaagattcgagggtgcggatccggatatggatacgggtgcggggattcggctaatataaaatagagctataataatattctaaattttgagagatattctgtgaaaaacttacatgaatattgtacaactcaatctttcattctccaagattgacattattcttccattgttctaaatttgttttatttttgattttgagaaatcaaaatctcaatttttctcccaaatttgtctatgaactccggtcaaagtgtccgaagtcagttgaccgtatccgggacgtatcccgtcccagtatcggtatccgtcccgtatcaggacggggacgacaccaaaatcgaagagtccacgcaacatggggttgtctacatcacaccccttgtgttgcgactcttccccgtaccctgcgtgaatgcgggatactttgtgcgccgaactacccctttttatatatttttttttccaggaaaaatgggccgcccgatgcactaagctcccgctatgcgcgggatatggggaaggaccggaccacaaggatctgtgcatttttgcaagaggctgttgtcacggcttgaacatgtgatctcttggtcacatgacaacaactttaccagttgcgccaaggctacccttcatttttttccagaaaactgaactataaaatgacgcggattcaatattttttcgatacctgtcaagtaattatttccaagatcaagtgtggtaagcatggtcaaatttccaacatctcttggtaaaggtccttcaagcatgttaccactcatgtatacaagttcaagtgatgaaatgttgaatatggttaaagggatcgagccctttaatttatttttttccaggactaacagcttcaagttataaagatgaccaatctcatatggaattgtgcctgtcaaaagaaatatcatattaaaaaaaaatcatatatttaacaagagcttaactctatacaattaatgctcatagaaaccaaccatatataatatatttgcagttaacaatagctgaagtaacatatatagtgcttgtttacattaaatagtttcaaatatttgaaacctaattatttttttcgtaccaatttgttcgtgcttttctcattgttttcacatcatcttcttggctcatttagcttttaaagtccgattcttggttgcataactccactcttaaaattgatatcaagaaattcattatgatcggctcctccttgtactagaggctctctggcaggtgaggggcttgctatcataaccttttatccccgtgtacgtgaaaaagccaataaaagaaaatcataagcttgaagagacgagaaaggaacccttggatgatgcaggcatcagaggtttgtgggaaaacttagatatcttactatcactaaacctgacattacctattctgtgaggttggtaagccaatatatgcatactccggatgactctttagcaacctaaggtaatccgacctgttcgacgcttttttttgctatatacccccaggtccagatattcgctagttggaaggttaaaaagatgaataatgctgggtaataattggatcttgttaccacccgaataacattaacaccttttaaataagagggaataggttggcatatcaagatttcacctcaagcttagaaatgaagacttggtgtctagaaccaatctctaaggcctaaacagattgcgtggaatttgaattgataaagttgatgttatgtttgtttagattgaggatatgttttggtgtgaagaaaaatattttttaattttttcatattttattggcttaaatattttgtaaaatattcttttgaggaagaaaaaatattttctgaaactttctttctatcttccccacccctaccttcacccacaatccacacccttgccgccccaacccccatactcctgacccaccaccaccactctaccctccacccaccctccaaccccctgctccgactaacctcataccccgtcccaccacccaatcttctttgatcctcttcccctagggcgagattgaggtcagggttgagatttggggtcaggattgtggttcgaggtcgaggttggggtgaagatcgagatcggagttggaatcgaggattagagatcaaaattgaatttcgagattggggttcaaggtcgaggccgatttttgggttaggatcgaggtcaaagttcatgatcatcgttaagattagaattgacgttgaagtcgaggtgggaattagagtttgaggtcgggtttgaagtttagagtcgggtttggtgttcgaggtcgggattagagttttaggtttagagttggggtcgagtttgtgggttggaatcagggtcaaggtcgatgtcaaggatcagggtcgaggtcgaaggttgaggtttaggtagggggtgagggttcgaggttggattcaaggtcgggtctgagttatgaggatggggttgagatttagggttggggttgggattctggttcaaattcgatctcgatcctgaccttaaacctcgacctcgctgatcctgatcccgactctgatcctgaaccccgtttcttgactctgagcttctacttgagctaggccataaccccgacccccaaccccatctctaaactcgagctaccgaacccgatctcgaccctaacctttgtccctgatcccgctctcgaacccccaccacaaccacgaacccttgcttgatctagacctcaaccttggatcggacccgcaccgcgttgctcattctcctttccttacccatttcatctcccatggtatatgcttaagttatatattttccaaaaaatattttctgttaggtaaccaaacaccagaaaataagtatgaaaatcatttattttccattgaaactattttaattcataccaaaaccgacccaagtggacgcagtgaatcgtaggagcgttatttcacgtcaaggataagttaagtagaagcctatctttcttgaggcatgtcacggtttagctattatggtctatgggcaaaaaaatatgattcttacaatttagctataaatgctctgattacattatgctttgctttttagttcatgtttccgttaaaacttgtcccacttgtcacatggccctacaatactagggcttgaccgaaatataggctgctgagtgctgactactagaatacaaaactacaaaggtttagttttttatgagaggaccttagaaaaaaagtacagagaggagaatagatttgtatttatagtcacgatagaccgttagacactaggttaaattaagtaggaattattcagtattttatttttttggaaaagggtatttttgtgatggaaaaaaaattaaaaccggctttgacaccaaggcaaatttactttccttcggcttcttctccatggcagaaaaactacttttgctagattgattgtgtattcaggggacatgtacatttttctaccactacagctaccacttaaaaatatatttttttctaaaaatttggttagatacgtcaactctctaaaataagcacatttataaaaataaaaaaaaagagacaaaaataagcacttttcacattgatatgtcaaattcaatgacataataataataaagggcagcctcgattcactaagctctcgttatggaaagagtccggggaatagccggaccacaaggatctattgtacggagccttaccctgcatttctgcaagaagccgttttcacggcttgaacctgtgaccccctggtcaaatgacaacaactttaccagttacgccaagggacaacaactttaggcgtccccttctgtcaaattatataatacaacaacagcaacaacccagtataatcctactagtggggtctggggtgggtagtgtatacgcagactttacccctaccctggggtagagagactgttttcgatagaccctcggctccctccctccaagaactccctaccttgctcttggggtgacttgaactcacaacctcttggttggaagtggagggtgctcaccactagagcaaccattcaaattctataatactataactaaaattgaactcccaagaaaatggtaaaacacataccttctaacttattaattccaagacttaaatcttgcagcagctgtaagttccctagttctcttggaattgttccatctaacttattttccatcaaatatagagcttgaagttgtgaacattcagaaatacttcttggtatctgtccacttaacctattaaagttaagtataagttttcgcaatctgggaaggcgacgacagaaatcagatggaagattaccagttaaaccagaattttcaagatccaaatcttctagtaatgagatgttaaacatagatagcacatttgagccattgagtttattgaatccaaagctcaacaatttcaaactctgaaggtcagtagctattcctctaggaatatttccttccaaattgttgtaacctagtttcaagaattcaagattcttcatgtttgagattgaagaaggaatgaatccattgaaactattcatttcaagagacaacattcgaatatcacccgaaaacgaaggaatttgaccggttaagtagttgtcactaagatcaatggatcttaatcttggtaaatgagagatttctggtggaacttcgctgtggaattcgttgtggcttagatcaagtgaaacaagaaatgagaggtttccgagctgtggagggatagtaccattaaaccctaaacctgaaatattcagtacagtaactcgttgatgacgagagctacaagtgattccaatccatttacaaactgaggttgaagatgaccagtttgttgaaagaatgtgattaggatctgaagtgatgcgcgcttttaacgctagaagtgaagattgatcggtgcttatattcatcgctaagcatgttgttataacgcgaagagatattactaacaatgctaatagcgaaaaggcggaggtggaggaggaggaggaagttttctccattgaaaggaagtgtgtttgtttgttggatctttgcaacactatacaatcattctctacagcagcattcatatataacaaccattcactgtaaaagccaatttttttcagaatcgatttttatgttatgttggattatatgtcctctataacaacactttactagcaacattcatatataacaaccattcactataaaatctcagtttttctcagaaccgatttttatgttatgttggaatatatgtcttttataacaacactttactagcaacatccgtgtataacatccgttcactataaaagccaagtttttctcataaccgatttttatgttatgttggaatatatgtcctctataacaacactttactagcaacatttatatataacaaccattcactataaaagtcaagtttttatataacaagataatgctaagaagttctattattgaacctaattaagaacataatgctatcaattattagcttcgttatgctagcttcatgctaccaaaaaaaaaaaaaaggttgaaaatatgttcaagatctagtaataaatgccaacacatgaaaaagaatctttcaccacctttgcaacgattttatatttaggctttatttgtttttattaggactaatacatctgaatattacgattaagaatgagatgtctgaatctgaataccatatataagacgtgaattaattttatctgaatactgaatggttgacactggttaattttttaacatataaatgtatataatttatttttatataaaattaataaatatctaaattaaatactaattcatctaattctatatcaataaaatatagttgacagtggcgggtggtagtgatgactaacagtaatgattgtagcatatgctaatatttaggaacttcattaatccttcaatcctttcattaatcttaattaaattcttaacaatttaaatgataaatacttcaactacagatttcgggttcgaacctatagtatagaaccgtttttgttagtaagcgctcaagtcgctgacatcgagcttttattaagtcttttaattaagtgattggagaataaatagaacaatttttataacttcggctatctatttgtattgaaaaagcaactgagctacacattgcagaggaatcattaacatctttatcatcgtcactcgatttctatcaatctttctattgtgaatcataagttcttattattttattgttgttattactttaaatacgagtagctaaactcattatctagaatttttatggagtcgttggttgaattctttgattatttttcctattaatcgagccattttaatctcgtttgttcaacaatgtgttaattgttgttaaattgaagacttctcaattaaacgcgtcattatatcatgttttacttggaacatatcataagattaggtagatgttgaacaacggcactccagaaatattcttttcattctctcatattttcttctttttagataattcttctgtataggtcaaaatctatctaggaggccgacactaaagaaagctgtgaaaggtcggccaaaccgtggtcacggcttgtagagcgcgaccccgtcagccatcggtcgtacctgagactgaaccaatgacgggtctgtgctattaaacgaccgttgtgaacgacgatccaagagggacgtgctcatggaataactgtcacactccctttttctaccccccaaaaagatatgtgttagttatggattgtgggtaaagagttttttcaattaaagtgacaaatttgaatagggattatttcatttacagagtcgccacttggaattgatttttcggtgttccaagtcacctttcatttgaatccctagtcgaaggaaggtttgactctattcttatcgctccgcgaaaacaaagttccggtaaggaattctattgaccggggaaaaggtgtaaggcattccccgagtcccgtgattctagcacggtcgctttattgacttaaaatttggcttgaattaattttggataaaactgtgatttatatgattttcatgttttacctactcgcttttatttcttgattattagaaaaattagataatataataggatgtcataatcacactacgcaagcgaatgcgtgatcgagacgaaatttattgacttttgtcataaccgcgctacgcaagcgaatccgcagttctgacaaggattatcagtatattattacttctaaaaaagttattatatttaaaggaattaactaaatatcaattatcgcgctacgcaagcgaatccgcgattttagcaaaagattaattaaattgaaagttaactaaaaaaaatgagtattgtatgacattgttgaattaatgtatttaatgttaaacatcaagctacggaagcgactctgtgatcttaaagcgtgctacgaattgcctatcgcttaaatattattaagaaagagaattatgagtggtgaagttactaagatattttaattactaagaaaatcctattgttgttggagttaataaaaagaatcggcatcggaaggtttgagtcattttcgcttattgtcttttcaaggcattaagccaccttatgcttatggatttggttcacaatacaattggcctagaagaattacctaaattatactattgtttttaaacaaatttggcagtctaaaaaaaattgatttcctactacatatcttcttaaaatagagaacaaaactaaatttctatttaactcaagtctatttctatttaacacatcttgagtttttctattttttttaaaaaaacgtacacctttttgacattctgttcgaactaagtttttctttttgaaatcataagtaaccaagaaaaactattaactcatgtaataattgcacaaaaacttctaagaacagttatatgagctcataactaagaaaggagaaagataaacgacactaacatgcttcaaaatttggtcactaagagcattttcattaagagaccaacatgaactctacctacaacattctaaacaacagaagcattatatggaaagtactttccataagcttcattcaagatttacactattgaaggtaaaaaggaatgcctaatacagaagaatcagaaattagaacgtcatctagacgagtcattgactaacggaaaaaaaaaaaacaaaacaaaaacttagcactcttatacatgcttgatacttaaaaagggaagatgattatacacaaacataatgcttgatacttaaaagggaaccagattatatacaaacataatgctttcaagaataaaatactctaaaaggattcagaacacttcctttccattcactcttgacccaaaagtagtacaacggttgagtaaattagttgaggagataacctgatgaacagaaagaaaatattagcaatggagggactaaatttcagcaaacaaatagcaatagcagcagcagcgcaacagcagtaacagcaggatcaaacaacaatttaaaccagcaattcaaaccaaagtgaactagaaacttgaccaaaaactcaacagcttgagagaaagaaaccaagattggcttcaagcatttaagtatctttgcaaagtctttccagaaacaaaaaatcgctcaaacaactctcagatttttcagcttactaagagtgtttaaccgatatcttactctctcagatgtgtaaaagaagtctttaacaatgtgtgtaaaacatgtgtctcttttagagtccagatcctcttcaaatgaggaaagagttttcattttatagggggaggaaggaccttggggcagattttgtttggccaaaaatctgtccaaaataatagatttttgaccaaaaatctgtccaaaaccagaattttgtccaagaaaacagtttttcttaccaactgtggacagaaatttggagtattatactccaaaacagcccccgaacagtaaaagcaaccaaacaaaggccctacactcaagtaccctcactttctttccctttcctcttagtccctcaaaccaaatccaaagctaactagttcacaaagagaattcagattcattctagtttaaaaagctagtaattcaaacaagatcggttaagagtcaactagtaggaatcaaaaaaggcttaacacatataactacctatactaaataactacttcaaacttaatatagttaattaggactaacactagatctttaaacactttaactactaactcaaactgaaacatgatatcaaaacaacccgaaactgcaattcgattggtgattcaaactcctaacgagcgactaaacatcatcaccaaacaacaaacatactaatataagcaaactggatcattgattatcggaaactaaactttaatcctaagaactattgaaaccaaaaattaaaagggtcatgaaatgacggatttaagacttcagttcaagcgactaccaataccaatgatcaaggacgtaaatgaaacacgacaattaggcacaacctgtattaacggtgacatattccccaaaatgattaacattcaacaaaggcgaaataagaaattagactaaacatgaaggttaaacaaaacaaataaaaacaaaacttaatctacaaagaaaacgacacaaaaacagaaaaaataaaactttagaggaaatagtaggggttcgaggtttttaccaagttcagggcgttcgacgtcaaatcgttaaatgagacgatgcagaggatgtcaagtggtggtcgtccgaccatgaggcgcatatttctttttggtagacgctaaaccaatagattccagcgtcttgccaacaagaaacaagtgcttttggtcgaaaaagaagaagaaacaagaagaaaaaaactggaggagcagcggcggcggaggcggcgggcagtagggtggtcgccggagtttcgggtgaagttggaatcaataggtaggtctttaagagcactttccgttgatgtaggtattgatggggtgagatggtttggtttgcggagaatttcaaaaagaaatagggcctagggtttcggatttttgccgatttgcggcatttgagaaggattctaaggatttggggcttggatatgggtagaggatgaagagaggaagagaatggtgtaattttgggggggttgggacacgggccgccggcggtggcgatttccggccagcgccgccgccgtggagggtgtgggcggcagagatagggagagggagaagaaagagtgaagagagaaggagaagaggataagtaaagggggaaatggggcaaaaatttgggtattagagggcttaaatacctaagataaggatggttttttgccattggatccaattaagatgagtggctgagattggatcttactttcacttaatgaaatgacgtagttttgaggtgatactacgttcaaacgtcgttttgaactctttcttcgccagccacttaattggcattaaatttacactcttagccacctaactatttcgcttttaaccattttcctttaatcctatcttattaaactataatctaattaacctaaataccaactaataaaataaacctaataaaactcattagctaacaattgaattaattatatgagaaatcaatttgattaacttatcaaataattagtcaattaaagagcacacacaaaaagaaaagtatagaagattgtttttggtatttttatgacaagaaattcaataaaaaatgcgcaaaatataaggaaaataatgattgaaggaaaattgacactaacaactttaggagcatataaatggtgcaaaaattaggtattcacagctgcccctctttgctcgagaacatgaagtgttttcgtgcaaagaaaagtgaatgcaatagctaatttttgctcaaatatcactccaatggaagcagtttttgaaaaatggtgaccgaaccttgcttctgaggttgcctacatatctttggctataaagaaatcaggtcagtgtagttctgcgaaaacttggtagctgggactaccggacattggagttaagactgttgctgctgctattattgctgttactgttacttgctgcttacaacaaaagaagaggagaactacatattgctgcaagctaagagttacaaaattcctatctatgtgtcttctggagtcaaatcttgattcttgaccttctcacttgtgttgaccttagattggatcttgatgttttttgacgaaaagactacgactcattcctgattgcttcatttcccgatcagaatttgggaagatgataattgagaagctggattattgacacattatcaatgctcacttcaactatcttgtgatcaaaggacccctttcttctgatgggagattgaaactgcaagctttggccatcacctgtgctctacggcgggcctgaaaagccatcaaagccgaacaaaaattttctgccccaatttggactaggaaaattttgtgagttctcagagaaagctataaactatataatttattgaaaggcacacagaaacagtagtataaacaaactaaaagagataaaatttgtaacgagggattgcgtaccttacgttaccaaaaggataggtaaccaggggttggtaccctgtattactgaaaaggaatgtaaccaggggttggtaccctgtattactggagaggaatgtaacgaggggttggtaccctgtattactggaaaggaatgtaacgaggggttggtaccctgtattactggagatgaatgtaaccaggggttggcaccctgtattactggaaaggaaatgtaaccaggggttggtaccctgtattactggagaagaatgtaaccaggggttggcaccttgtattactggagaagaatgtaataagggcttggtaccatgtattactggagaggaatgtaaccaggggttgacaccctgtattattggaaatgaaatgtaaccaggggttggtaccctgtattactggagaagaatgtaaccacaggttggcaccctgtattactggagaagaatgtaattaggggttggtaccctgtattactggagaagaaggtaaccaggggttgacaccctgtattactgataaagtgttgaattcctctaggcgaaatggttctacccgagttaagctacgtaaaacaccctgagcgaagagtacgtttacccggaactatgagctggatccctctaggcgaaacggttctacctaggttaagctacgtaaaacaacctgagcgaagagtacttctacccggaactatgagctggatcacgctaggtgaaatggttctacctaggttaagctatgtaaaatgacctgagtgaagagtactcttacccggaactatgagctggatccccctaggcgaaatggttctacctaagttaagctacaaaaatgggagatatggacagtagtgatgcatgcttaagaaaatgaagattttaaggatcttatgttcggtgacattcgtcctataagaatcgccattctgcactgctttgttcctgcttcaaacaaagaaaaatttatgagttttcaaagttgtggttggtttgtggccttgatgccctattgtggtttgacttcacggcctttccgcaactgaagaaatgattctatcagtatggtaccgaggttctcggatactctatcacggcctctccggagttgaagaactgattctatcagtatggtaccgagatgctcgacttatctgtatcattttatggagaccttggctttctaatgttgcccccaactgtttcatacccaaacgtccttggtattgctacctttgtctttgaggcaatgcaattttctttaaaaatcaaactcatttgtcctgtacctagtaccggtttttgtctgcaatgcttatcaacttttctcatgaagaggtcttgcttaggcaaccttttcagtttctttgaaacactttgttcgccttatcaaatgaaatcacagacggattcgtgccttcgtcaattccgtatatgccccaaattgtgctcgatattacggggaaactgtagccagttttgcagtcatttccttgcttcgcttttgacgaaagattagaccgaaaaggactcaaagaaaattatgggtaaaaatagaagaatacttgaaggtgaaaaaaaaatgtgcttaaccgaaaggcatccctttcgggaaaaggaatagggagacttatttggaagtatgtgccggcttcaatgaatcatgacgtgcattttggactggacgcctgatccgtctgagctgtctaattctcaaaatccgttgccaatgctcatcttgaaactgtcttggttgtgctcatgccggagtacgaagattctcattcggctagtagcgccctttgcgggttttcgctaactaacctctctcatttctctactcaccattgtcttatggtgcccgtctgggttttcaccgagaagactctctcatttctctgcttacagtcgccttacagtgcccatacaggtttatactgataagacgttctcatttgtatatttttttatttttaatcttttttttcttttttttaattgagatacgacatgcggaaggttgccgaatgaacctggaatggggccttcaaatattttcaaagatcaatcagaagttcttaacagcgagaaagggaaaagaaccttgaattgaattacaacttttggaagcatttttatagaaaaaaccgtaaaataaaacaaacttctgccctagttttggagtattgggaatatggattttttgttgtgatgggaccgaacccagggtaaggctgcctacgtatcctttcggaatcaggtcggacgtagttcaatgactcaagatatttgttgtttgactttttcttcttccttttttttgtggcttttacaagtacacaggttccaaaaaggtggaaaacaaataagacaaataagactcaaaaggttaacaaaatggtgacacctatttggaatgacgagcaatgataaccttcgtcatctcaatctgagacaatcatgggtgaaagttccatactgggtatatatcagacataatatcgtttggctgcatctacgttaatagtcatgtctggtacccgtccttcttcatctaccaagtgcaaggctccttttggtaacacttcttgatgatgtagggtccttgccagtttggggagaactttcctttagcttctacttggtgtggaagaatgcgtttcagaacgagttggcctacctcgaagtgccttggacgcactttcttgttgtaagcgcgtgccattctttgctggtataactggccaaagcacactgttgctagtcgtttttcatcaatcaacattaattgttctaatcgggtctttacccattctgtatcttcaatctccgactccgcaatgatccgaagagaaggaatttcaacttcagccggtattacaacttatgttccatataccaacatataaggagttgcaccaatagatgtgcgagtagtcgtgcggtatcccaaaagagcaaaaggaaacttttcatgccattgtctggaaccttggatcatcttcctaagaatcttcttgatgttcttcttcgctgcttcaacgactccattggctttcggccggtaaggggtagaatgtcgatgcataattttaaattgcgcgcatacctctttcatcaaatgactatttagattggctgcattgtcagtgataatggtctttgggataccaaagcgacagatgatgttggaatgaacgaagtctaccactgctttcttggtgactgctttgaaagtgacaacctccacccacttggtgaagtaatcgactgcaaccaaaatgaatctatgtccattttaagactttggctcgattgtcccaataacatccattccccaagcaacgaaaggccaaagagaggacatgggatgcaactccgaaggtggcgagtgaatcaggtcacaatgaatctggcattggtgacacttgcgaacaaaactgaagaaatctcgctccatagtaagccaataataccctgcccacagaatcttttttgctagaacatatccattcatgtgaggtccgcatacccctgaatgcacttcactcatgatccgctcagcttccgtggcatctatgcacctcaacaagttcaaatctagggtccttttgtacaaaatttccccattcaggaagaaaccgctggcaagccgccttatagttctttttttatctcccttggcatgctctgggtaatcccttgttttcaggaatcgttttatgtcatgataccatggttcaccatctggttccgtctcaatagtgttgcagtaaccatgttgattccgtacttggatttccaatggatcaatatgagtgtttcctggataagggagcatcgaggctaaagtagccaaggcatcggctagctcgttatgaaacctaggaatgtacctgaactcgatagatttgaatcttctgctcaagtctcgtacacattgcctgtatggaataatattgatgtctcgagtctctcattcgccttgggcttgccggataagcaagtcggaatctcccataaccaaaagttcatgcacatccagatcgagggccatttttagacccatgatacaaacttcgtattctgccgtgttattggtacagaagaatcgaagtcgggccgttgcagggtaatgttgtcaaataggtgagataaggattgccccgatcccaactcctttgatattgacaaccccatcaaaatacattttccatacgtggttgtcatccagagctacttcctctattgagttgacctcttcgtctgggaagtatgtgctaagtggcttgtactcatcatcaactggattctctgccaagtgatctgccaaagcctgtgctttcatcgcggtgcgagtgacatagacgatgtcaaactctgtgagcagaatttgccatttcgcgagcctgctagtggacattggcttttggaagatgtacttcaaaggatctattctggatatgaggtaagtagtgtaggccaatagataatgcctcaaacttctgagcgacccaagtcaaggcacaacatgtcctctataaaagggtgtacttaacctcataattggtgaatttcttgatcaaataatagattgcttgttccttttttcctgttgcatcatgttgccccagaacgcatccaacagaattatccatcaccgatagatataaaaacaacagcctaccaggttcaggtgggaccagtataaggggtttcgacagataatctttgatcctgtcaaaagctctttggcaatcgtctgtccacttgatggcagcatcctttttcaacaacttaaagataggctcgcacgtggttgtgagctgatcaatgaacctactgatgtagttcatcctcccgagcaaactcataacttcctttttgttcttcgggggtggcagatcacgaatggactttatcttagatggatccaatcgaacacgtctcggtattcaaataaaagttgaatcaagacatctctggttttttgttcagtgtgaatgcttatctttgtttctctaacatcttcatgacttccaatattaatggactcagtttcattgaggttaggcttaggcttgttttaaaattgttccaactctctttttatttcttcaacagcctcatcttcatcatattcaacctcttgatgcattatttcgaaattagacagctttttaagatctgggcgtgaattccgcatgcatgtcatgttattaaagccgacattaacaaaactgaaatggaaacaaaaaatgaccgaaattaggaaaaaagaaaagatacaaagcttaatacgaaactgaactgcatttcattgaattcgaaaggatggaatggttaacatcaaaacaaaataatcatactgagatgtttggattacaacccggaaagtaacccaaagtacaaaagggaaactgcaaaagcaaactaccaagactccttccttgtgaggagatgagttgcttcccaattgttgagcatggtgtctgggccaattatttgcatatcggcacggctagtgccttcaccggcctggatcatattcacttcagaaaacatctggccgaggccgtggcaaatttcatcaatgtttgcctgcgccgaggaactttgaccttcttggagttgtggcttgacaaaagtatagaaaatgtgagggataggttgttgcaagacccatccatgatttttgcggtgcttggctttgtcttcgtctgcttgtgttggcctgaagcctaaaccaaaagtaccttggttactgaacggagaaatgggctccgaaattccttgcaacgacgcccctaagccttttcctggctcataaccttgtcccagcataagtgcagccaccattacagatgtggcggaaagacgaggatgcagaatgggctttccttcctcgacatgatccacaacaaccactttaaaagactgatagacaatggactcacacccttccctggcctcaatacatgggattaatgggctttataaatggacgactcgtcttccccgtgaatgataatttcttgcatgtcatgttcaaacttgagcatctgatgtaaggtggacggcacagctcaggccgtatggatccatggccttccaagaagaaagttgtaagaagtgtccatgtccactatctggaagacaatttcaaagtcaactggcccaatcgtcatggtgaggctgatctccccaatggtatctctcgctgagctatcaaaagcccggatgcggacattactgggtcggattctgtctgtattgatcttcattctttgcaaggtggagagaggacacacatctacactcgagcctctatcaaccatgactcactttacgtagtgcccctcacatttaatagtcaagtgcaaagccctgttgttcccgactccttcttcggggagttcatcatcagtaaaggtgattctgttcacctcaaaagtctgttggccatcttctctaactgattcactgtggtcttctctgagacatgtgcctcgtttaggatcttgattagcacacgagcatgctcttttgaatgcatgagaagagatagtagagaaatttgggcaggagtctttctcagctggtcaatgattgagtaatcctgaactttcatctttttcaaaaactcttccgcctcttcttcagtgacaggtttctttgtcggtaattggccttctctgattttcttggccttcctcaactcttccggagagtaatacctccccgatcgagtcaaacctccagtttcccccacttcttctatgatttccttgcctttgtaagtcatcacagtttttctgtagttccaaggaatggtcttcgtgtttgtcacagggggttgtacggcaggtttgattatgactggctcgatcatacccttcgcaccgccctggttctgccttgtgatggggtgacctccaaggacatataaccttgagcttggaacattggagcggacttccaacctcgagatttttggaaaagataaagttgccttccctgagctctgggcgccttttataatcaatggcacatctcggcttggacttacttttagacctgttccttctggaattgctcctgctgtcatttctactcggccaaccggcttgtattcttgatctcggctaatcattcccacaaagtgaacatcattatgtgctggcaaggggttgttggtcacattagaagggtcctcgtcatttgtcaccacaatcagtttttcagcaattagtctttctatggctctcttcagagtccaacagtcatcagtgttatgccccggggcccctgaatgatattcacatctggaatttgcttgaaatccatgtgaatcaggatgcatatggtggggagcgatgggtccaatcactcatatttgcttcatcttatggaataaactagatatgattcagccaatggggtgaatttttctgtcggcctctactctcgaccataatcctgcctgggacgagcattgtagggtgcccaaaaattttgctgttgaggtcgggggatccttggagctggtgcccgtacttgctgattgggaggccgagcataggattgagcattgaacactgtatattgtggtgggaccacagagtattgaggaattggcggaggataataatgttgagggtagctggattgcccctgctgaacttgcacataagtgtgcagtgcccccctttgaacttccctgggtcctgaagtcatcatggacccctcatctctcttatttttatttgcgaaacttcccgacccattttggatagcttgggtagtgtccttgagagcaacttgacttacaattctgccagtcttgagaccattttcgaccatctctcctattttgattgcttctgcaaaatgtctacccatcgcggacatcatgttctgaaaataatcaggctcttgcgcctcaagaaaaacagtgatcaactcatggttatccatgggtgtcttgaccctagccgcttgctccctccacttgatcgcatactccctaaagctttcagttggccttttcttcatattggacaaggaattgtgatctggcgcaatatctatgttgtactggaattgtctgacgaaggcctgggccatgtcgtcccagacatgccagtgaaagatatcttggtcaatgaaccattcggaggctacccccagaagactttctccaaaataagccatcaacaattcttcctttccacctgcacccctcagctggttgcattaccttttcaagtgggcgatggggtcgccgtgaccatcatacttctcaaattttggggtcttgaaccctggtggcaaacggatgtgagggaacatgcataaatcactgaaagatacacttttttgaccacctattccttgtatgttctttatgttctgttcaagacttttcattttcctggccatctcatctggctcaactttcttagcaggcttttcattttccattggtgactcgtattgaggagtctggttgtatggagacgagaccccgaaagccatatttggagagtaatattgtccatcataatcatgatatggtggctcgttgtttggcctcgtcacagaaagtggtggcgggattgtatataccggcgcgccagacataacaagaggggtgttcctggccggtgcggctggaggtcgcacattagaggtaccaggggcggcatggaagctgtagtttggcacataccctagtggtagaatgtgatctctcgttgcacggagcggtggttgagtagccaggggtacggtggaagttccttctgaggaaccttgaggcggaggctgaccagagacccaagcctgatacacatcagacaattgttgtttcaatcttcttacttcctccgacgcttgctcaactgactgaccatgggggtcgtcactgaccaactcaatttcatcattgttagccatcggtacctttttctttagatctggtgaagtaatgatgtgttgccagtttcaccacaaaccaaccaccttaagcttactatataagagacaacaaacgtgttagggttaagcattttacacatatgaatcacacgtaatatgccgtgttcctaacattgtcaccatttctaacatgcttatggaaggcttcatgtttcatcccgacttataaggttgcttcttattggcgctctcaaattttccctttttacaaaaaaaatttctctctttctcattttttttttcgcttttcttttcactcgcctcattttgtttcctcattttagagttattgaaatattttgatcgaaccttttaggggttgcctacgtatcatgtcgccgcatgaatcagatcattacgtagttcagggacacgataatgtttttttttaacaaaacaaacatctttggttcaattttgaattttctaaaacaaaatcattttcattgatatttttttttaatacaagaaccaaaaacaaaaaattacataaacgcgaacatctaaataacaccaaacttgactaaaaaacagacttttgaagatgaaaagcataacaacaagactaaacacaccaaagactcttacatactcaatgacaacaaacaatcaaaatggactgccaaataaaagagactctgatctttgcgggggaatccaacggaatcactatagtcaaggcactcattcctgtggctgacccccaacatcacgatatatcctctctaaatctgtagatatgtgacgggtgacgttcaatgatatttctgcaaaccgctctggcgtcattccctggcaactcttgcaagctcgagaggtatatgtggctacctcgaggatctttcccttaatgtgctcctgagccaaatacaactcttgattttgctgaccacgagtttcggctagatccagtgcatcacgctcgcgctccaaggccatatctctttggcgccgaatttccagtgactccccctccaaccgattgatcatactttggtaatgatgtctttctatttcaaactctgcggtctggcgctccttgattgactcaactccccctatctgatccctcagaccttgtattaatagagaaaaacctatgcgttcatgatcacggaccaccttgaattgggcttctctttcttcctgttgttgagctgtagggatcacgtttttctgcctcacttgagctttgagtgctcacctctcttgtgcccacttagccttttcctgctcaaaatcaacctgatgtatgtccatgactgtctccaaaatgcctttatcttcttgtaagatgtcaatacgagattagaactctagtgttacttcccttctggtttctctaactctggactcgatctccttttcccaatccaccgcatgtcgtatggatctttctggcctttgctccgggatagcctggctgtgaaaccactcaaggtatgtgatgcttacctccccacgttcacgatcagctaccatctcgtccaaatcagaaaatcgaccaccgaaccaaaccttttgtgcatatgactcccttggaggttcctctacctcgaattcccacacgaacgcactcttgtcctcagtcggtgacctcttttgctctctccctaactagcgcatgacgcgtaggggtgcgtacgattggaaacctctgaaacccatgagtatgaagaacggacgatacgtcgacatatgaatgaccctagcagaagggaaccaataatatttccaagtgattctatcagtatgaaccgagcaatgttcgccaagccctcaccctctctggaagattacaacttgcggccctgtccgggtgacatccgatgtaattaagccaattgtcattgaatttcactgttattggatgatgatagaggtgctctatgaaccacatttgcagcagaatgttgcatccctcgaagtaatctttaccctcttggcaacgggtcaaagatcgaaaaatatcccccaaaatcatgggaagaatggtatgatcctcgctactttgaaaatacgagactaccgcatccaatcgaattctgatacgcccatcgcgctctggaaagaccatggtccccataaacgatatcatgaatgcgaagattctcaactccctccatgcgtcgtaactcaattggttgacgaattctgtgcccgaaaagttttcaaatactttcttatccccaaatctgtcatagaaatactccaacggaacccaaccttcgtccaggcaacccattggaattcgacggaggcataactttttcaaaaagttgttcacaccaatttttctcggggcagcgggctttttcccacgaaggtctctccctaatccggtaaacccacctaattcttccaatgtaggcgtcatttcacaatctttgaacctgaagacattgttcaccgggtcccagaaatccactacagcctcgattaaatctttgttaggcttaattcccatgatgtttgtgaggaacttgaggtgcttaaatacgtgattccattccatgtagcaaaactagcccaccattgcaaagactagtcggtgtcttatctctgatcaagaacataggaggtgtctcgtcccttacctttttctgactgcttctttgtggagaattcatggtgaacctaagaataagataaaaaggggtcaggacttacctaagctatatgaaattcagattattcttttctttttttttaatttaaaaaatgtcatttaggactcgatctatttactatttttttaattggcagacgcaaaaattaggaaaatgactattatcatgaaaatgaccttttggctactttaacaaaaatggcccttcggtacttcccaggaagattttaaggttgtcttggaaaaacggccggaatacgagggcaaacagtaaaaggtgaccaaagaaatgatattcactaacgaaaactattatcatgaaaactagaacgtcatctagaatcaaaatcaaattattttcattctttcgaaaattgaaaagaaaatttaagattcaaaaatattttctttttctttagaagtattcctttcataaattcaaaataaatgtccaaatatccacacaaaaaagttcttttcttctttaaaagttttttttcgaaattcgaaaaaaaaaaacaacaaaaaaaaaacaatagttttcatgataatagtttttgtcatagaaaggactttccataagtttcattcaagatttacactatttaaggtaaaaaggaatgcctaatacagaagaatcggaaattagaacgtcatctagacgagtcattgactaacgaaaaaaaaaacaaaaaaatacttagcactcttatacatacttgatacttaaaaggggaagatgattatacacaaacataatgcttgatacttaaaagggaaccagattatatacaaatataatgctttcaagaataaaatactctaaaaggattcagaacacttcctttccattcactcttgacccaaaagtagtacaacagttgagtaaattagttgaggagattacctgatgaacagaaagaaaatattagcaatggagggactaaatttcagcaagcaaatagcaatagcagcagcagcgcaacaacattagcagcagcaacgcaacagcagtagcagcaggatcaaacaacaatttaaaccagcaattcaaaccaaagcgaaccagaaacttgaccaaaaactcaatagcttgagagaaagaaactaagattggcttcaagcatttaagtatcgttgcaaagtctttccagaaacaaaaaatcgctcaaacaactctcagatttttcagcttacaaagagtctttaaccgatatcttactctctcagatgtgtaaaaagaagtctttaacaatgtgtgtaaaacatgtgtcttttttagagtccagatcctcttcaaatgaggaaagagttttctttttatagggggaggaaggaccttgggacagattttgtttggccaaaaatctgtccaaactgatagatttttgaccaaaaatctgtccaaaaccagaattttgtccaagaaaatagtttttcttaccaaccgtggacagaaatttggagtattatactccaaaacagcccccggacagtaaaagcaaccaaacaatggccctacactcaagtaccctcactttctttccctttcctcttagtccctcaaaccaaatccaaagctaactagttcacaaagagaattcagattcattctagttcaaaaagctagtaattcaaacaagatcggttaagagtcaactagtaggaatcaaaaaaggcttaaacatataactacctatactaaatacctacttcaaacttaatatagttaattaggactaacacttgatctttaaacactttaactactaactcaaactgaaacatgatatcaaaacaacccgaaactgcaatccgattggtgattcaaactcctaacgagcgactaaacatcatcaccaaacaacaaacatactaatataagcaaaccggatcattgattatcggaaactaaactttaatcctaagaactattgaaaccaaaaattaaaagggtcatgaaatgacggatttaagacttcagttcaagcgactaccaataccaatgatcaaggacgtaaatgaaacacgacaattaggcacaacctgtattaacggtgacatattccccaaaacgattaacattcaacaaaggcgaaataagaaattagactaaacatgaagattcaacaaaacaaataaaaacagaacttaatctacaaagaaaacgacacaaaaacagaaaaaataaaactttagaggaaagaataggggttcgaggtttttaccaagttcaggtcgttcaacgtcgaatcgataaatgagacgatgccgaggatgtcaagtggtggtcatccgaccatgaggcgcatgtttctttttggaagacgctaaaccaatagattccagcgtcttgccaacaagaaacaagtgcttttggtcgaaaaagaagaagaaacaagagaaaaaaaaactagaggagcagcggcggcggaggcgacgggcagtagggtggtcgccggagtttcgggtgaagctggaatcaataggtaggtctttaagagcactttccgttgatgtaggtattgatggggtgagatggtttgatttgcggagaatttcaaaaagaaatagggcctagggtttcggatttttgccgatttgcggcatttgagaaggattctaaggatttggggcttggatatgggtagaggatgaagagaggaagagaatggtgtaatttgggggcggtttggacacgggccgccggcggtggcgatttccggccggcggcgccgccgtggagggtgtgcgcggcagagatagggagagggagaagacagagtgaagagagaaggagaagaggagaagtaaagggggaaatggggcaaaactttgggtattagagggcttaaatacctaagataaggatggtttttggcaattggatccaattaagatgagtggctgagattggatcttactttcacttaatgaaatgacgtagttttgaggcgatactacgttgttttgaactctttcttgtccagccacttaattggcattaaatttacactcttagccacctaactatttcgattttaaccattttcctttaatcctatcttattaaactataatctaattaacctaaataccaactaataaaacctaataaaactcattagctaacaattgaattaattatatgagaaatcaatttgattaacttatcaaataattagtcaattaaagagcacacacaaaaagaaaagtatagaagattgtttttggtatttttatgacaagaaattcaattaaaaatgcgcaaaatataaggaaaataatgattgaaggaaaattgacactaacaactttaggagcatctaaatggtgcaaaaattaggtattcacaataacccatcagttaaagactaccggacaaagggggaatacagggatataaatagaggaggatcttctacagcagagggggaaaaagaagggggaaaagggcttcctctagctcctccaacgaatggaatgaggacaaagcccacactttcaagaggggatctctttctgattcatacacagagatacgagataagacttcgaaaatgtaagcttattttcgtgcagggcgggacgggtttactcttatgcgggtgcgaggcgggttaaaacaatttttaaaaattttaaagcggggcggagcggattgcgagtttaatgcgggttcaatgcgaattgcatgtacaacagtcaaattacaaaaataatttggctaacaatgttagtgaggtgaaactgatgctcctggtaaaaaaacttataaacctccccctagttacatctcataaatcaattttctttaaagtttgatacctgatatcccatatatgattttaccagattaaattttctgttttacagaaagcgaaaactaaatatcgagatagatgtattcgaaacgcactttggtgacatatatcaagaaataatgcacatatactgcagcttactgtaaaatgtcaaagtattttgatttagaaaaaaaaattaaaaaaaagaaaaaaagttaagtggtgcgggacgaggcggggcgaaaactgaaaaaataactatgcggcgcggggtgggacgggtttttgtgggttttgccacgcacccgcccgcaccgtcccattgccatccctatcttgataaacattttcatatcttgatgattatggttggagattttgataaggaccaataaattttaggtaatgatcgcctttggtttcttgtattcaattggcttgtggtatataagagaaaaacaactgctcgatattcacataggatccagggaagtaatcgcaccctaaataatatataagagaataagagtaaattaattaaaagaagatcgatatatggtaacaatttatgaaattacatatattcttgatttttaatcagcttcacatgtttgataatgagctggaataattactacaaatcatggatcacttaaatcctatcatataaattgattattgtataattaaaaaaaaacaatccaattgaagaccttattatggaacttaatttctttcatattctccataaaaaaataataatctctatgctttcagtcaatgaaccaaatgagccaatgccttcatggactgcgattgacctgaaattattcctgtagttgatgggttttgtcccaaaactatacaatagccatcatcataattctccattccttgtgccataagttgccatactaagctccctgccatagttccaccttcttttgccaaattgtagacatttttatacacactgctcatgaatgtgtctcttgaactaagattgtatccttgacctctgttagactttccaaattcagctagaactagaggtttctttagtatggttcttgcatcttgccaatgacttgtgatccacctttccatccatgccaattgtgcatcatcgttctgtccggataccctataaatataaaaacgttttattcactgacagcggaatacatatttacacaatcaggtcacttataagttaatataagtaaatttctataactagctttgataacgacctaataacatgatgcctgctatataacttaattatagatctgaagttatatattctcttttttctattagtttagagttctttccttttcctagcatatacaataacatcaacatgtgaatttttgaggggagaaaagatgttataatataccactggtcagtgtacgcatgaatagtggcaaaatcaatctcactgataagatggttactgatgaaatctgttccaacttgataaccaggattaacttgcttcctttcaggaattgaatcgccgtaaaatccttccattcctacctccaacaagtgtttgttgtctagtaactttacaaaacttgccatttcttgaacccaaacctagagcgaaatcaaaattttacagcaaaaagtgatcagtcattgatataactaatttggaaatgaattaaaagtcattaattgaaactcacattaacagtttttccagaatagtcagcttggtcacgtggctcattaatgagttcccatgccatgattgttggatcatctctgtaagaaaccctagtaatggtattgaacctcgtaacaattttctgttgcaatttcataacatgaacataaatgtattaattaaccaccaaactaatttcttcaactttacttaataatgaagatattatgcagattaataattatattgcgtaaataccttaatgtggttcttgtaataatctttgagtgtaggatgagtatagaaatcatcgtcactattgatctgagcccctgcatttcgcgcccactgaacatattgggctttccctccaaagtcgttccagttgtttacaaagctcaagattaagcgaacaccatattttttagcttccgagatcacaaaatccaaaccctaaattcagaaaatacacaataatacttaataaccctaaattagaaacaattacaaaaagtatctaattaactagtgacatatttcatattgttttgataattaaaccacaatatgtttaatagttatatacataacactatgcaaaggacttctacattattggaacggagtgagcagttaataatgaattattactcgatatatcttccaggttgccatatcacattatatatatatatataaaactacgtgttgttgtatgttaacttaactaggtaacgtaaatattctttatatcgtcattgcatagaacataaatttttacctgaaaaacgcgttcatcataaacgccaggtgatatttgcaatgctctgtcacctccatcactgaaagcccacgtacgacaaacagaaagaccagcagctgatgcatctttaagaacttcagagactttgtacctctcactaggttcagcagcaacatgcatcaaccaataagagttgaaaccattgaatagaaaaggagatccattaagttcaaaatgagcatcattaactgctataaaccctgcattagcatttcttggaaccctagcttcacatgcaagagctaagaacaagaataagagcccagaaatacagctagtttttgtaaaattcattttgtagtttaagttctatagtgaatggaatagatgtgatatgttagagatttcaccaattgtgggcttttataatgagttgaagataaggaaatttactaaaaatagcaaattttccaagtggatggaaattgaaattttgttaagtttacctgaaaatattttatttttaaaggtatcatgggatgttgatagaagaggaaggaagttatttagttaaagcagaaagagacaaattatgggggaaaaacaatacatatatatatatatatatatgtattgcaatttgcatctatttggttagtttttaaagtctgatcagtattagatttgataatgaaatatatatatatatatatatagaaacgtgtactcaagtaattgcagttagagaaggttagttaaattgcaactagcacattgagttattttatttggaaaaggagacttttcaggtgggaaaaggccagttgggagttcttgtttttagcccttcctagttgttttattttgacattcttctcttccatttttgcttctatgaaagcagcactttcacctatatgaaaatattgaaactaactcgatatgttacgttaaatcaaaaacttcatgacacgtgtttatatatttagtctcttacttgatcatggaaattaattgatgtatattctcacctccttaaattacttaatcatgataaactaatatggaagtttttactatgcagtaactaatgtttatatccatttccatcctttgcactttccttcttatttttgattggcatagttgtatacggttaaaatcagacttgtcttttttgtatgattaatcgagaccgaggcatggcagaccaatgttcgatcccatgttataccggaccgtgacacgaagttagattgccaagctcgtgactcagggaccgatcgagatcgagatcaaccaagatcgagaccgagcgggatagagatcgagcaagatcgagggaagcctgttgagccaaataacaaaaagccaagatatctgcgatcaggcgaggatcacgacggaaatctcggcacgtatcaagaagaggccgattaatcaactaatcatgggatttcttactgtatttaggattgtattaagggtaggactcctctaatatataaaagggggtctgatcatttgtaaagcacatcagattaacaaaattcaaagcatatactacttttctcttgagttttcaatacactgttgttctgttcatattttctagtagaatatatgtttgattcgaaggcgacctagctcgagggccaagactgcacttaccatttggtttgcttttctttacggtcaataattaatatcaacttacgtattttctcattttgtgccaagtgaaatcacgtatccttgaaaccacatataaattcaattgttatatgtttttaggataaacagtttggcgcccaccgtggagtcaaggataataatggttgtctggtgctaatttttgtaacacacattattttatacttgttattgtgcgtgtttttgattccaggatcagcatgcctaactctcaagcaacacccacacccatcgacaatggcattggtttacacggcgaaaacgacaacatagcctccccagggaacaaactgactcacgttgacctcgatggagtttcggtcgcagacccaatcaacgtcagttcccatattgccattaatgaaaatatggtcatcgatcatgagaatagcgtccgcagagacgttcgatcagccggttagaacgcacagggcggcaaagaaggcggaatcatccttcgaataatatttgaaatcttgcatgctcaacaagctacaatagcacaactccaaaatcagaaccatgcaccgagcagggtcgagcccgagccatcccaggaagttgttcatagggacgaatcagtgttgagaagatcaaacggaaatgaatcaggaactgaccccgctatcatgaagatgctcgaggagttgacaaagcgaattgaatcgggggagaagaagatggaagacaatgacaagaaggtggaaacctataactccagggttgatcaaattccgggggcaccaccgactttgtagggattggattctaagaagtttgtacaaaagctcttcccctcgagagcggcccctaaaccaattctcatgaagttccgcatgctagaatcccaagtacaatggaacgacagaccccaacgagcacgtcacttcttacacatgtgctattaaggggaacgatctggaggaccatgagatcgagtccatactgtagaagaaattcagggaaaccctatcaaagggagtgatgatatggtaccataattttccacctatttcttttgattcttttgccatgctcgcagattccttcgttaaagcacacgccgaagccataaaggtcgagactaggaagtcggacctcttcaaggtaaaacagaaagataacgagatgctcagagagttggtgtctcgattctaaatggaacacatggatctaccacccgtttccaatgattgggccgttcaagccttcactcgaggattaaacatacgaagctcagtggcctcacaacagttaaagcagaacttgattaaatacctagttgtcacctgggtcgatgtgcataatcggtatcaatcgaagattaggttcgaagacgaccaattgggaactccttccgggcccgtttatcctatcaagaacgtcgacagagttaaaagggatattgaccgggaaccacagttaaacaacgatcattaccatccatatagtggagatcggagaaacaacatgcctggacgcaaccccgttcgaggtgttagaagaaatgatcaaggtcagaactctcgagggatcatgagcaagagtggtttcgacatgaatgctgatcccaaagaagcaccacggctatcggaatacaacttcaacgttgatgcgtcagctatcgtatcatccataggacacatcaaagacactaggtggcctcgacctctgcagactgatccggcccaaagaaaccctaatcaaatgtgcaagtatcatggcacccatggtcataggacagaagattgcagacaactaaagtaggaggtagtctggttgttcaacgaggggcatcttcgggaattcttaagcgaccgggataagaaccacttcaggaacagagattcaaacagacagaacgagaaagagggagacacaacacgtaatccatatgattgtggaagggtcgatattcctcagcgacccatattcaagagcaccaaggtgtcaatcataagagaaaagcaaattcgggattatataccggaagggaccttgcctttcaatgacgaggatgcagaggggatcttacaaccccataacgatgcactggtaatatctgttcttatgaataaaactcaagttaaacgtgtttttattgatccaggtagctcggccaacatcattcaatcgagggtcgtagaatagcttgatctacataatcaagtcgtgcccgcgacccgagtacttaacggcttcaatatggcatgcgaaaccaccaaaggcgaaataactttgccagtgaacgtggacgagaccatccaagaaacaaatttccatgtaattgagggtgacatgaggtataacgccctgttcgaaaagccatgggtctataacatgagggcagtaacctcgacccttcaccaggttctgaagttcccgacactagagggagtcaaaaatagtatacggggagcaacccgccgccaaagaaatgcttgcagtcgacgaagtgataccaatatcgacactctcatcaaaaggatcggattcaaagggaaaataggaggccaaatagcaaccacaaacaccgacctcgacccaatcagataaacaaggaactaaagaggatgatgactacgaggtccctcggtctttcatagtccccgatgattccaacgccacaaagttgacggtcgaagagctggaacaaatcacattgaccaaacatcatcctgaacaaaaggtatacttggtcacatagctaagcccccgagatcaaggaataaatattcaattccttaaagctaacatgaattgctttgcttggtcccatctcgatatgacatggatcccaccggaaatcagcactcacaaactaagtcaagcatgccttcgctaaggacgaggtaaccaaacttcttaaaataggatccattagggaagtaaagtatcccgaatggttagcgaacgtagtgtcgtccctaagaaggggaataaacttaagatgtgtgtagattacaaagacctaaataaatcatgtcctaaggattcttttcctttgcctaatatcgatcgtataatatatgccacgattggccacgaggttatcaattttctcgacgcctactccgggtaaaaccaaatgtaaatgaacacggaagatcaggaaaaggcctcgtatcactaagtacggcacctacggttataatgtaaatacctttcggactaaaaaatgttggtgcaacttatcaacgcctattaaatcggatgttcgaagaacaaataggaaaattaatgaaagtttatattgatgacatgttagttaagtccttgcgagtagaggaccatttgaagcatatgcaggaaactttcggtatactgaagaggtactacatgaagctcaacccagaaaaatatgtgttcggggtcggctcagcaagtttctcagcttcatggtatccaatcaagtaatcgagatcaaccccgataaaatcaaagttatcgaggacatcacggtagtaaacaacgtaaaggtcgtgcagagtctaacagggcgcataagcgccctggggcgattcatctcgagatccccagataagagtcaccgattcttcttgttactaaagaagaagaataatttcacgtggactctggaatgccaacaggccttggaggaactaaagtggtacttatggagcccgccgctgcttcacacactaaaagcgaatgatcagatttacttgtatttagtagtctcggagaaagcagtaagtggaatcttggtctgagaagaacaaggtacacaattccctatcgattatgttagtcggaccttaggtgacgccgaaactaggaacccccatctagaaaaattggcgttcgctttgataagcgcctctaggaaactaaaaccatactttcaatgtcatcacatatgtgttgtaacaacttatccacttcaaaatattttgcataagcccaaactttctggccggttggccaaatgggtcatagaaatcagtgagtacaatattgaatatcgaccccgaacggccatcaagtctcaaatcttggcagacttcgtggcctacttcacgacgtccctcgtacccgaatttgaaagagaactgttagtaaaatctagtacatcttcgggaatctagaccctctttatggatggtgcttgaacgtaaaagggtccggactcggcatcgtggtaaaaccacccacaggtaacgtagttagacaatctatcagaactacgaaattgactaacaatgaggccgaatatgaggcaataattgcagggctcgaactagccaaagtcctgggagcggaggtgatcgaagccaaatatgactcccccttgttgtgaactaggttagtggaacctttgaagttcgagaggaacgaatgcaaagatacttggataagctacaagtaactctacaccgattcaaggaatggactttgcaacatgtgcctcaaaatcaaaatagcaaggtcgatgccctcgcaaacctagggttatcggtcgaagacatcgaactaaattcagcggctgtcagtacaattcatgaggacagtggttgaagaaggccatgctgagatccaaaggaatcgagggccatgcgcacaaaggaagcccgatttagcttgtccgaagatagaaccttactcaggagggtgttcgacgtttcgctagaaatatgtctaggaccgggagatactgaatatgttttgagggaaatccatgaaggcacatgcggtaaccactcaggcgccgaatcattggttcgaaaggtaatcagagcccgctattactggatcgatatggaaaaagatgcgaaggagtttgtgcaaaaatgtgataaatgtcaaagacatgctcctatgatttatcaacccggggagctgctgcattcagttttatcgccatgtccgttcatgaagtggggatggacatcaacggcgcacttccatagggtctaggtaaggctcaatttgttttgtttatgactaactatttctctaaatgggttgacgccaggcataccaaaagatcatggagaaggaagtcatcgactttatttgggaccacataatatgtcgattcagaataccatccgaaattgcatgtgacaacggaaaacaatttattggcaacaaagtgaccaaatttctcaaagaccataagatcaaaaggaccttatcaacaccttatcaccctaataggaatggaaaagttgaatcgaccaacaaaaccataatccaaaacctcaataaaaggttgatcgactccaaggggaaatggagagagatcctacccaaagtcctttgggcgtatcgcgcaacttcgaagtccggtaccggggctatcccgttctctctggtttattgcaccgaagatttaataccggtcgaagttggaggaaccgagcattatattccagtatgcaacaaaggaatcgaatgacgaggccatgaatacaagcctggagctattagatgaacggcgtgaagttgcctttgttcgattggctgcccagaaacaacatatcgaaaggtattacaatcgaagggccaaccttcgatatttcagtgtcggggacttggtgctgaggaaggtcacgctaaacacccaaaatccaaatgaaggaaaattggatccgaactgggaagggccgtaccatattctcgagatcacaggaaagggtcttataagctcggaacggtggacggagaactgctatcgaacaattggaactatcatgtcaaacgatattactattaaggtacgatcccatttcaattctttttattttttgactaacacttgcaggttatcgatgaggagcgacacgaagcctttaggtctgaaagcacacgtagcactctttttcccttgaactattttttttcaattgggttttacggaaaggtttttaatgatgcaacaacggatcgtgctaacttagaatcgaaggtcgatcacgaatcggtgtcaaagacaacacttacagtatctgaggttcctctacaatcaacctcgaatactgggggcattgcccttggatgtcaactttgttgcgaggaaattaattcataatagcggggtcacgataggtgagatttgtaagggccaaaagttcaaacaaactgtgcccacatagcttgctcgagccctggcacaaaacatgtacgcatgtgtaatcatttttcacaagaataaagagaagtatttttccttgccattatctcatgtcttagaaaaggtttttctactttacaatttcgcacttctgatatattatggaaatgagctctaggtccaatcataagcagagctaggataatcacccccacacttggggactgccgtttgaaaataaattcgaacagatcgaactattgagcatcgagggcataagaccttttaggcaaccctcaaattttaaaggccacggccatacccactcggggattgttgtcttaggcaagcctggataactcggggaagcaagctcactgggctacacccgaactaaaaggctatgaccagtttaacacggttcatagacgtcaaatttgtaacaaaaataggccttcgaaaaaaaatatatttcacaacgggttctaagggctaccctcggtagaatcataaacttacgatatattcgggatcagtggcgaagctagaaattttttagagggtgaatttaaaagaagtgaattttttcccgacaaagggtgttcaatatgtgttatatacctctaaaacgtaatattttacctacgtacacagtgcactttttcaacgaagggtggtcatttgaccacccttaaccccatgtggcttctccactgttcgggataaatcttcagcaactccgaaccccgataatgccttaaccagaaaggcaataaaggcaaggttttgttcgaaccctcaaacgcaaccttattatttcatgctaaggcattccaacctttgtaatacgaatgataaatcaaagggaaaaattttgagagccgaaaaaggtagaaagccttatatatatacataaacgatctttctacaaaggccagatctgccaaatacaaaatttacaaaataaagcaaaaatacaaaggcctaagggctacttttacttcgagttcgagcaggccctcgctcgatcataaaccctaaaggctactttgatttggtttcaagcaaatcgtctcatttttttatctgcgtattaagcctgagggctacctcagctcaagttcgtatgatcattcggggcccaccgatcaaaaacggttgaggtagtacttattatcggtccttgtcgtctcaacctcggaccttaaaatacaaattcgtgaatttataaggcgctttgacctttataaaagggaaaaaatgttttatatatacttcaaaagtcatttacaagggcaacacgaaccgatggaaattctttacaaaatctgaaacggcctcaacagaaacacaaaatatatgaaatcctaaaaggcctagtcatctccaggagcaacatcttcacccttgaggctttctccactttcggatccacacaagctctcagaatcgttgtcatcaaggtaagctaaacccctggcttcagcttcaagctccttagcgctttcgatctcggctataagatcgaagccctgagcatggatctcctcaagagtctcccttcgagactggcatctggccttctcaacgacccaatttgctcgaaatcgagcagcctcgatgacctcctttgctcgaacctgagcagcttcggcatcggcccgataaatagttaccactgcgtcagcattggccttggtcactttgacctccgatttggctgcttcaagctttatgaccagcttgtcccgatcgaaaattgttgaacccaattgagactggagctcctcaattttcttggcttgcaccaaggctttctctttcatgcttcggagttggatttaagccgaggccagttcggctcgggcagactccttttctgaggcaaggcaatctatattcttcttccattcttcgacctcaattttcactacgtctacttcctcacggagtttcccgatcacatcgagcttttgttggacttgcgggttcgaactattagccaccatgcctgagtcaccattactaacttcaaatattcttcttacctgctcggccagcttggcgtgttccttttgagccacttctagctcatcaaggaggattttagcttcccattctctttgcttgctgagaagcttgaaggcatcctttgcttagtaatccctcagatctcggcctcataccagttccgctcccctcgggatcggaagaaatcctcatgataaagcaccaaggcctacaaacatagaaaaatgagttatataaagggagaaaagtctaagtacaaaaattgacatcgacaaagaaatctgggattacccggtttagatcttgttgtgcttcgttgaaaagacagggtgtttccacctcatccatcttggcttggtcttcttcagtgaccaagcatcggagatagctagccatccctacgggggcagaaagaaccctgagcatcctccgggaccgagatgataattgattgcttacgcccgggatcgacactgggggccgaaaattgattggtcagtttaaatcttgaggaagcctcactcgagctcttcctcggtacctccaagtcacccagaccgttgttatcttctactccaataaaatagccatgaaaaaggtcttcttctccatgtaccccttccccgtggcaagtctccattgcatgagcttcatgtatcatcgacccagtgaatgaaggaaacgagggggagtcttcgatatctatatccccaagtaaatcttttgaggcaccgccttcatctcggggagcctcgagcatggtttctacaccagcatcaaccacctcctcagtagccttctcaccttgaggtgaagcgtcttcagctctttatggctcggggacttcggctgaggcttccccctcaatatcatcaagtcaaggcagagtagttttaactcccaccgacttagtagttcttcaaatctcggtgctagctcgcacacgggccaccagcccagagtcttcttcttctctttgttcttcggactcatcccttagtcgttggactgactccaaacacagagggatgatgttccccttgggtttgcgggctattttctttttggatttctgccctccagattttgtggaattcgaagaccttttcctcttcttctccctcactggattcgagacagatggtaggggaaggatttcttcatcaccagacgggagcctcatcgtcacatccttcatgagacctacaaaagaagaaaaatgagtacaatattcaagcagtggtcaaatcattaagtcgagaaattttttttaccatgactactagccttgtcacgaccccaaatcctaacaggtcgtgatggcgcctataatggaactaggctagccaaccattaccttactctgcttttgttcaattataatagttcacaattaaataataagcaagcaaccacatcataattaatataataaagtattagcgttcccatattaacctaaacaacctcccaagaactggagtcaatagtcaagagcatctaagaataaataaactaactctgctaaaactataatataagtctctgaatcaaatgctaagactaaataaggaagggaaatggagaagctgtggacgctggacagctacctcgaaatcccgtgaaacgctgctatcaactgcgtcagctactgctgcgaactagtacatggatctgtgcacagaggcacagggagtctttatgagtacgccaactcagtagtaatgaaaataaatcacaatctgagtaatataaacacacagaacatgtacacaatttcacaaaccagtaaaacaccaagtcaccatgtagcattcatcaaataataagttcgaatcagtttccagaaatcctttgaaaacaagtacaatatcagtatatctcaataaaattctcagtgaaaaccagtttgaaaatgaagtaagtcatagtttgaaaactcagtaaaaatcttcataaaactgtccctcgggccaaaatcatttatcgtaaccattgcccatcatgcatcctcacaatcactctgcccacaggcatcctcacattcactctgcccatcaggcatcctcatattcactcttcccatcaggcatcctcacaatcactcttcataagccccgcgggcatcactcattcggtaccggcgctcactgggggtgtgttacagactccggaggggctcctacagcccaagcgcaataataagccacagcatggcataattcacacacaatataggcccgcagcctcactcatatcatatcatcctcacaatataggccagcagcctcactcagtcagacactctcaatttgcccttcaggccatagtataccgggttctcgacccaagaacaatatttcattttcaagaagtagtatcaaaatactctgagtgtcaaaacaatttcacagaaagactgagtaaaaaatcataacatagcagtgagaaaaaatagtaaaaacatcccccaaggggtaaacaagtcggcactaggccccaaacatggctaacagcccaaatcatatcaaaatatatctatactattaagtataggattagaaatcggtttcacaactcaacagtcgcctaaataggaaagatgtttccaaagtttccacctttttatctcaaaacccgtgaaagggtgcatagtccggggtttcatacactcaggacaggatttaaagacattacttacctcaaaactagctcgaaactactccgcaatgcgcttgcctcttgaataaacctccgaaggctccaaatctacaaagttcagatttttatcatcaatatgggcttaaggaattatttccaatcgaaagatatcaaatttactcaaaaattcgaattcggtcaaaacccgacccccgagcccgcgtcctgaaactcagaaatttttacagaaaagtgttcttcatcttcccacgagtccgtacatataaagaacaccaaaatcggagtccgtttgacccctcaaatcaccccttgaaggtctcataatcccatgccccaaaatcctatttttctactgtttttcatgaattaaaggctgggattatggtctataatcacccataaatgagttttaatgatcaaaatacttaactttgtgataaccaatgattttcttctccaaaattcgtccaagaagctccttgtccgtacaccaatggtgaaataagggtttaggtcgcggatgaaatatttaaatactgcccagtgatttcttcaccatgatcgcagccttggccctgcgatcgcacagtgttagggttttgacttttgcgatcgcagcctctaggcacgcgatcgcacagcactcctgacctcccgaccccacgcgccccaaacgctctacgcgatcgcaagaaacctcacgcgaccgcactgcttaacctgctcgttctctgcgatcgcgggcgcacttatgcgatcgcagagagtaagtactgacccctctcaaaatgctctatgcgatcgcgactccctttatgcgatcgcagagagtaaaaatctgctgcactgacaccagaaaacagcagtttctctaagtccaaatgagtccgttaatcacccgaaatcaatcccgagcccctcgggaccccaaccaaacttaccaacatatcccataacatcattcaaacttatttgcactctaaaaacatcaaaactaacatcaaaactccaaattctcatccaattcaagtctatgatttccaaaaacttccgaaactcgcatttgatcaaaaacccaaccaaatcatctccgaatgacctgaaattttgcgggaaagtccaaaatgacctaacaaagctacaacaactctcggaatcccattccgaccctcggatcaaaatcttgcctatcaaccggaattcgccaaaatactaacttcgccaattcaagcctaattctacatcgggcatcctaaaaatattctgaacacactcctaggtcccaaatcacctaacgaagctatccaaaccataaaatacgtattctgaggtcatttaccaataagtcaactcttagttgactttttcaattttaaggttgttcttaaggactaagtgactaaattctcatttaaccatttcgatttcaagcctatcaactctaacacataaataatagaataaccaaaatataataagccactaacaacagttataatgcaggttttacgtaacgacagatcgggtcgttataagcctcccatcgacccttcgacaaatcgtgccatacgcgctcacatgtgtcatctgcgatattaggcttgtgacctagccctctagttggggaaccaaaccaggcatcaaggcaacggctgcatcaagtaaaatgttgataagaaagggtgaaaaacgaagacaataaacaaaaattaaggacggaattatacttacgattcatattccatttcttaggaaatggcatactctcaaccgggatcaagtccgaggtctttactcgaacaaataggcccatccagccccggtctttttcctcatccatgctcgagaaaggtgacccggtggcccgacgttgaagctttatagtcctcttcgatagagtcgggggctatacaggcgtatgaggtggtcgagggtgaagggaagcccatcgattttgcttacgaagaaatgaagtaatatcactatcctctagaaagagtgatgaatctgaccgagggtcacctcgtattttttgcagaaatctatgataatcagatccaagggacccaacgtgaagaggtaagtgtaaacacttaagaacccttctatgtgggccttctggagaaggcactaccacctgtttcttaacccagttgcaatctttttttaacctgggagaggaggtcatcgagtatcgagcatacatacctcgatgccggatcacatcgacctggaaccgaggaggtcttttcaaccttgaagtcagaatcgatgacgcaccctccgggaaagaactctttagggcgtggctccgccgctggttcctcgccagccgaccgggacgaggaagcggttactttttgctggacagttttctaagttttagccatttaatttttatgaatggagaagaatagaaagtgaaaaggaatacttgccgagccaaataacagaaagacaagatatccgtgttcggacgaggatcacaacagaaatctcggcacgcatcaagaagaggccgattaatcagctaattatgggatttctcactgtatttaggattgtattaagggtaggactcccctactacataaagggggtatgatcatttgcaaagcacatcagattaacactattcaaagcaatatagtacttttctcttgagttttcaataccatgttgttctgttcatattttctagtagaatatatgtttgatgcgtaggcgacctagttcgagggccaaggctgcacatatcatttgatttgcttttctttacggtcaataactaatatcaatttacgtattttctcattcaagtgaaatcacgtatccttgaaactacatataaattcaattgttatccgtttttaggctaaaccatagtaaaggggagtccaattgcaattaagtttgtcatattaaatccaatattttgtaatgatgcagtttaattatagtatatgctagttgactagaagagcatctagatcagctactgaatgagtttagcaacatataataaactgtgactggattttttttttctattcgtttttggatagtgcatcatccaaagtgaaaggatgagattacactttcgaacacactagtgaaacataaattcatgtccttattcaggagtgttggattatattacgcaatggaagcaatttcaaatcaaattcacatgtaatttaaacaactaacacatatagagtttacacgaattaacttttgaagcatgaactaagtacttctatcgtgttggtctccagtttcagagtaactctatgaaaacaccaccaataacatgattacgaccttcaaatattctacggttttctcctgtattacccgaataatatccaaaaaaaagcaaattttgtgtgggcaaaatttcaaagaaaccaacaaccgaaaatggccagccctatggaggaaaccccatgtatatatagacatgattttagggtcagaatcctttttcaaatcctgttgggttttctttttcaccaagtaaaagtttttctttatttcctggtatctagacacaataggtgccaaataatttaattaacaaggctccctattataaaattaatttcaattttgaaattaatatctaccgtaataaattataaattatttcactaaaaattgctaattgcattccatatttcaattttaactaaaaataaaataactcaatgtgctagttgcaatttaactaaccttctctaactgcaattacttgagtacacgtttctatatatatatatatatatttcattatcaaatctaatactgatcagactttaaaaactaaccaaatagatgcaaattgcaatacatatatatatatatatatatgtattgtttttcccccataatttgtctctttctgctttaactaaataacttccttcctcttctatcaacatcccatgatacctttaaaaataaaatattttcaggtaaacttaacaaaatttcaatttccatccacttggaaaatttgctatttttagtaaatttccttatcttcaactcattataaaagcccacaattggtgaaatctctaacatatcacatctattccattcactatagaacttaaactacaaaatgaattttacaaaaactagctgtatttctgggctcttattcttgttcttagctcttgcatgtgaagctagggttccaagaaatgctaatgcagggtttatagcagttaatgatgctcattttgaacttaatggatctccttttctattcaatggtttcaactcttattggttgatgcatgttgctgctgaacctagtgagaggtacaaagtctctgaagttcttaaagatgcatcagctgctggtctttctgtttgtcgtacgtgggctttcagtgatggaggtgacagagcattgcaaatatcacctggcgtttatgatgaacgcgtttttcaggtaaaaatttatgttctatgcaatgacgatataaagaatatttacgttacctagttaagttaacatacaacaacacgtagttttatatatatatataatgtgatatggcaacctggaagatatatcgagtaataattcattattaactgctcactccgttccaataatgtagaagtcctttgcatagtgttatgtatataactattaaacatattgtggtttaattatcaaaacaatatgaaatatgtcactagttaattagatactttttgtaattgtttctaatttagggttattaagtattattgtgtattttctgaatttagggtttggattttgtgatctcggaagctaaaaaatatggtgttcgcttaatcttgagctttgtaaacaactggaacgactttggagggaaagcccaatatgttcagtgggcgcgaaatgcaggggctcagatcaatagtgacgatgatttctatactcatcctacactcaaagattattacaagaaccacattaaggtatttacgcaatataattattaatctgcataatatcttcattattaagtaaagttgaagaaattagtttggtggttaattaatacatttatgttcatgttatgaaattgcaacagaaaattgttacgaggttcaataccattactagggtttcttacagagatgatccaacaatcatggcatgggaactcattaatgagccacgtgaccaagctgactattctggaaaaactgttaatgtgagtttcaattaatgacttttaattcatttccaaattagttatatcaatgactgatcactttttgctgtaaaattttgatttcgctctaggtttgggttcaagaaatggcaagttttgtaaagttactagacaacaaacacttgttggaggtaggaatggaaggattttacggcgattcaattcctgaaaggaagcaagttaatcctggttatcaagttggaacagatttcatcagtaaccatcttatcagtgagattgattttgccactattcatgcgtacactgaccagtggtatattataacatcttttctcccctcaaaaattcacatgttgatgttattgtatatgctaggaaaaggaaagaactctaaactaatagaaaaaagagaatatataacttcagatctataattaagttatatagcaggcatcatgttattaggtcgttatcaaagctagttatagaaatttacttatattaacttataagtgacctgattgtgtaaatatgtattccgctgtcagtgaataaaacgtttttatatttatagggtatccggacagaacgatgatgcacaattggcatggatggaaaggtggatcacaagtcattggcaagatgcaagaaccatactaaagaaacctctagttctagctgaatttggaaagtctaacagaggtcaaggatacaatcttagttcaagagacacattcatgagcagtgtgtataaaaatgtctacaatttggcaaaagaaggtggaactatggcagggagcttagtatggcaacttatggcacaaggaatggagaattatgatgatggctattgtatagttttgggacaaaacccatcaactacaggaataatttcaggtcaatcgcagtccatgaaggcattggctcatttggttcattgactgaaagcatagagattattatttttttatggagaatatgaaagaaattaagttccataataaggtcttcaattggattgtttttttttaattatacaataatcaatttatatgataggatttaagtgatccatgatttgtagtaattattccagctcattatcaaacatgtgaagctgattaaaaatcaagaatatatgtaatttcataaattgtttccgaaaaaaaaaggaatgttaatcttttttgtcatttaaaggacaatgtctttacgtcttgtttggatggttgtcgttctatcgtattgttactttaaatataatatttgtattgattgttacttaaaatttatttgtatcgtattgtcaaattcgttgttacgtagccatgaaaagtgtcactttatgaaatgacggattttggtgtggtggcgtcgttaccttgctttttctctctcatattccccttccttattatttaataatcatattttatcttttatcctactcttttatataataattctacctcgtatcatattttttcttagtaatactgcaagtttattcttcatattgttgatgtgtgacatcatgaaacgatggcaaccgatacaatctatgcaaatattgtatttaccaaacaatgtagtacaatataagacaatatattatgaaacgacatgtaactacttttagggtacgcgcgatgtgcatgaatcctgtctcattgagtataaatttattttaaaatagtttaaattatacaataaaaattgaggttttataaaaatcgaggttttaaatcttagtgtttcattctaggtaaatattatttaattaattgtattctattggatggtatactcacgtctttcatttaataatatgttgtaacgactaaaaaggctaaagattaggagttctaacttaatttggcaaaattttaggtgatttaaatatcctaaatattagagaagtaacttaaattacaattgtattcaatataaaatctatttttattagaggataaaaaaggcgaacaacatttcgataaggaccttcgtgcttttaatatagtatagatagatagattaaagtaaatatttattttaaattagcaacagcggagaatgtagcatatagtcaatgaattcaacgaattcaatgttttcagtaatgagtataaatacatatgtcaaaaatcacaacaaaaaaagaaaagaatttgaacctatattttaaaaaaagtaaggaggtcatggagacctaaagattaaacatagagttcattttaataaggtgaaacgggttcctaaccacttaaaacttgcatcagtttgtaaagccgatatataaactattgggtttctcatttgaacacctttactttaaaaaatgactactaataaacacttgtaatggtgcgtgttgttcaattgttgctgacatgaatttaatttaatattttgtatagccacttcatccattcattcacattttattgacacatgtatgttcaaggttccaatttgtgggcctttgtctttttcaaaaattaatttattaaatttctattttttcttctctttcctttcttttattcttcacctcctaggcacaaactgtaaacataagctccgataatcgaaactgaagttcaatcgaatttcatctatttgcgaagaaccttcaccgatctaagtattaacgcaagtttctcagctttcagtaattacaacagtgatagatccgacgagtttccaaccacttcttcacaaattcagcggctatttttgtcttgcgcgtctgaaaactccaatgaattaatcgagcaacttgtctccggtctcgagtcaagttaaattgacgagcaaaagggtttaattgacaagcaaaagcaagctgcaacagagattagattagacttctgctaagaacaaaagcaagtggcaatggagattaaattcctcgagtcaagtttaagtagaaggagcatatacaagaaaaagaagtggtgaagaaaaaatcaaaatgcttgacttcatgaatatggtagaatagaaggggagggggaaaagaggggtgggagcttggtaggaagacgagagaggtgagagggaggggaaaagagagggggaaagggaaaggtctcttttttctatttttttgatcttatttatattttattatgattcttattttttttaaataaaaacaatactatccacacgtctttgcagctgatttgcacacaattttagccaagtcagttgcgccgcttccacataggcatagtcaacggtcaaatgaataatacacccatcttcgttccccggtttcccagtggaaaggactaatcttcctttctctaacttgagaatatctcatgtagtgtgtgaagacgaaaaaatcactcaattgactgcaatcatgcaacaatgaatctgattgaggaaattagacttgggtattattccgctgctaccttgtcgtgcatgttgcttgtgccttatttttcccaacacatacaactacatactaatcctaatagcttcaatttataggccctgaacctaaggattatcaaaagatccagagaactcggcttgatcaccataattgctagctgaaacaggttcctcgtaccactgattggctgcccgagtgatgaaactagcttctgcaattcataacgacgtaatctcaaaagagagcaggtgtacagttatgcagcaaacaacggattcctatcgctggctataaagttcattgcaatcagtggtcgtagcaaagaacgataagatactttgtagagagttggaataacataaggcagactaaccagatgcagattgaattatcatgtagtcgagttgtctgttatttacctgacaagaagacatccttgtattcttcatcgtcgtaaacaaattgtggaggatccggagagccaacccctactattgtgcttccgctgcatttccattttgggaattagtaacagtctcaggttttggaatcagtaacagtctcaaattaagaccaaagtgcacaaataagatgtcatttaagtatctatcctccctgagacagcaaacgagatataattacatttttgggccgctgtgaaaaataatatccaaaaatatatatatcttttgcatattatgtataaatacacatataatatacatattatatacataatcagtgtatatgttctgtatatttgggctagcacccgtaagccaacggccaaaaatgaaaaaagcccaaaagtattctcatcggccatgagtcttagaggaacatgtgagaaagctacctcataaaaaataatatccgaaaaatatatatgttttgcatattaagtataaatacacatataatatacatattatatacataatcagtttatatgttctgtatatttgggctagcacccgtaatcggtcgaactaagaggggtgtgtgcaacttacacaattaaatttagacacaaggcattagtaatcaagttaaaagaagataacttcatataatacattaattgaaaaaggttttacatattttgcctctattaatgtgagatctaaatccaaacagtggcataacactcttaatctcggtttcacctatcgtccaacatgcctaattcatattgacatgcccatccgcttgaaaaccctcaagtgcaagctaaaagtgttaaaactacgacaatctagaaaagagatagtaagaatatgaaccagattaaggcaaaagcataccttccagacatgaagacggcatcatactgtccccgaccggcagcaatcactcgttgttttagccttttaagagatggaagaacttcaaaggcaggaggttctgcaagaaataatgataatatcaaaggagtgcaattctgaccaaaaaatctacaaagttaagaagtgcaagatccattctgttgcctcccgaaaggaagcatatctaaaaagctacattctaccaataatgattccaaagtcgcatatacagaccagtggcgaagctaggaatttttccaatagtgttcaaatttaaaagcagtgaaaacatttcccaataaaaggtgttcaacatgtgttatatacctctaaaacataatcttttacctatctacacagtgcaatttttcgacgaatggcttcgccactgatacagactcaatgacctaggatggaaaataattgatattctttcaaaaaggaaagcatgataaaacaactgctaaaaagaagaggttggcttcacaatctacttcctgtgttcaatttagcagtcgagtttttgaatctagcttatgtctgcagcagaagaggaaaaggaaatactaaagactaaatcatctatttacttggcctgtgcacatgcctgaactggactaagcaactacaagaatggtcctttttacgaaaaatttcctatttctcgagcaaagtcacaaggaagttgaggaattacgaacaaatgctaatgtgaagagtgaagcctgaaaaaaaggttaaggtgcctaatcgtcatctcgtacctagatcattgacacacacatcttgagatattccactagttttgatcttctccagcaagctcaagggatcaacattactagtctgatccaatcgaaaacgctgcgaaaccaaatcttcttttagattttgataaccaaaatcatataatttcatcctaaacttgttcactaacttcattttgtgtcaccttgtaaacttcagcagtagagcattcttgctgaggctttatgagaaccattggaatgtcaaatggtatgggcgatggaatatcttgaacaacctgaacaagaaaaaggcatattttccataattgtaatatatgagacaagtaatagttttctataaatttacaaaacatttcaactgcattgaccactactgttgctcgcatgcatgtaacaccccaaactttagacatagtcccacatcggcaaaacacaagagggatgctgggtatacaagttaacaagccttagaccctagtgacgcgttttaaacccgtgagggcctaggcccagagcggacaatatcatcagcgggttgggctgttacagatggtatcagagccactcttgtgtcagccttgccgatggtgggtcagagttcaactgagtttaagcaaatcccggttaggcggggcaaacctcagctgagtccataagaggggttgtatgtaacaaccccagactttagacagagtcccacatcggcaaaacacaagagggatgttgtgtatataagttgacaagccttagaccctagtgagacgttttacacccgtgaggacctaggcccggagcagacaatatcattagcgggttgggctcttacaatgcaccttttccttgttttaagacaaaaactcagttccaaaagagattgagaattcttttatcgccatcacttttgcgagatttcagttttccatccaatttgaatctttgggttctatgtggaacctcaggccatcacactacttgttaacaccaattatgtaataatagctccttttttgcatgccagtttttaaattctgagaagcacaaagtcatttaagacacttgtcccaataaactatacttatcccctcacgtatcacataatgaacatgcctttttggtggacgcaacccaagctgctagccagttctcataatatttttttgacgacgttaatgagtttgaagttttgctgaagaacataaagcataacaactagtcctagtttaaatcttactaaccttacagggtaataaaagtcaaatgacctcatttacccctttctctagcatcgccatagttgaacaacagctctctggccaaacagttttctttttctcttaagttctttctaggatgtggttaccgctttccacccaaccttttcaaagactgattagaggcactactgacccaaagagatgcaaggacaagtatgttgcgtggactctccaaaatattgtcgcacccgtatcgaatcctccaatacactaattttggaggatacagcaagcacccggcaacattttcagagagtccgagcaacatagaaaccataatctcacacacaattggaagaaatataacatttggaagtaagtacaatggcaaaagcatacctcgcccctacccgtacagtaagctgctccatgggagaaaaagaaagaaatatcagaaccgatctcaccagaccactcttggagctccttttcagtggcaagacaaccactgaattgattcgctgcccacagcgctgttgcagcattactgctcccgccaccaagaccagccccagtaggcaccttcttatcaagatggatctgtccgttgaaataagtcataaagttaaatcagttggaatatatccaaaagatattcacaaactgatggatttgttagaaacttaaatactttacccaaaagtatttgtctgttccagttttttccctatacagattgagggcctttataatctgcaacgggagtggcaaaatcgtgaatctaccaatcatataattgtaattgatgagtacaaggataaccatattagcttcttgctttaccaaatttctctcgtcgaggggaactccagcaacattagtagataaacgatcctttgatttcgatggtgacaacgagaactttattttatctcctagactgattacctgaaggaacaaaaagggatttatttcataagctatatatctatacctaatacttcattagtaaatatcatataatatggcgcaatcccaattgaattctttcaagcttttaccatattctgagttctctcgagacgaaaatatgaagcagaaaacaggaagtgaagaatacatacatgaaagagagatgccaaatcatgatatccatcgtccctcttgcccgttattctcaagaaaacatttatctgcgacacaaaaagacggcaaatttgccaagagaaaagaaagaataagggtaaaatccacaaagagttctgatcaatgttgcacgcactctcaaaaatgatgccgcacccgtgtcggatcctccaaaaatacactgatccgacacatatccggcaacattttcggagaatccgagcaacataggttctgatactcaaagattgtaacttgatatgcattaccttgcaaggtgaaaaaagggtaagtcttgaaagcccagcctctctatctacttcatcggctaacttattaaacttctcttcaggattatatgttatctaagcacccccacaacaaaatgtacacaaagctcaaaacgtttcacacaattacagctccaaaaagaaagaaaaaacaagaaaatcaaatagaaactacaaaagccaaaaaaaattacagctccattccaacaaatgaatgaactcaggatcacatgttatctaagcaccccacaaaaaaattcaaacaaagctcagaactttctacacaacaataacaacaacaacaacccagtaaaatctcaccggtggggtttggggagggtagagtgtacgtggaccttacccctatcccaaacccctaccccaaagggagtagagaggttgtttccgggcagaactttctacacaattactcttaaaaagaacaagaaaataaattcaaacctagctatagaacaaagttcacaaaagtcccaaatttttctatacaattagagttccattacaacaaaaaataaagaaaaattgaaaccatgcccaaaaaagggttaccacttactctacttgttttctgctagttcttgaatccaaagctcaaaactttttacataattcacacaaagcttaaactttttacataattcaagcaaagctcaaaacttttcacataattcataaaaagcttcaaaactttagcataattacagctcaaaaaagaacaaaaaaaaaacaagaaaatcaaatacaaactaaaagagccaaataatttatacaattacagctccattccaagtttctaacaaaaaagtaaactcaaattcaaactttgcacaacaatagggttacctacttgttttctgctaattcaggaatccaaagctcaaaacattttacataattaccgctcaaagaagaaaacaacaacaacaacaacccagtatagtcccacaagtggggtctggggagggtagtgtgtacgcggaccttacttctaccccgatggggtagagaggctatttccgatagaccctcggctcaagaagattaaaagacaaaaatagacaatatattagtagcatcatggaaataataacaacacaagaaccggtgaatagctgaaaggcagaaacaatggccagtaaataaggcccggcactataaaaacagaagagtagcgtaacatagcactgaccacaaaagccaaatattttacacaattacagctccattttaacaaaaaaataaactcaaatccaaactatgcattatctaagcagccccaaaattcatacaaagctcaaaactttttacataattacagttttaaaaaaaacagaaaaagcaatttttttatacaattacagctccatttccaacaaaaaataaactcaaattcaatttatgcacaaattcatatgttatctaagcaccacccacccacccacccacaacaaaatccacacaaagctcaaaacattttacataattacagcttaaaaaaaacagaaaaaacatttttttatacaattacagctcaatacaacaaaaaataaactcaaattcaatttatgcacaacaaaaatagggttacctctacttgttttctggtagttcttgaatctgaagccttcactataacaaaattgcttcttccaaattgagaattcttttgaaaataagatgacccatttggcctttttgaccaagattgagaaaaatcactctttttaaaggaaccaatgtgtggttttttaacattataataacaagtgtaaagttggtaactaccaagaaaattacaggcagacatggctatttttctgcagaattttaagtgaattaaaagcaaaaattgaagaaaatgattcaattagtcaaaactcaaaaccccatttcaagaaaatgtgtttcttgtaaaaaacaattaaaaagtttcaatctttattcagtgtacaaaagttattgtttttggtaactgcacgtttcaaagatgatttttttatggttcttgtcgttattcaatctctgtactatagaatttgaaataaggaaaaaaggatttatgctctttttgttaggataaatggagattatagagaaaatgaagctaaaagtcaactgtttagtcaattcatcagtcaacacatctaaaaaattcagtgtagatttgagggttagtaacccaaatagttgctcaccaactactcaaattaaaaatagttggttgaagtataatatatatatatttcatgtattatatgagtataattatgtataatcaaatctatatatgattagaaaagtaaataatgaatatcacccactatttgtgtaaagatcccttaatataacatcgggtacatgttaacaaacaataaagcttaatattgtacagttgaaaaaataagaaaaattaaatttgaaaaacaacttgtttgaccctccaaatatcgtgtcatttgaaagaaaacaaaaacgtgctacttatccaaatttaataaatacaccaaattatgctaatatatcatgatcaaataattaattaagaaaataatacatattgattaactatgttaagtgataaattatatttaaaaaggcacagatcatgcacttattatgcacatgaaaacactcttaagcatatctgcgctcaggccgttcttatttgtaccggcgatggacgcacttacacatcatatccaatgagaggagccatggtatatgttgttcgctgatgatatagttctgattgatgagaagtgaggcggcattaatgggagactggacgtatggaggcaggccctggagtctaaaggttcaagttgagtaggaataagacagaatatgtggaatgtaagttcagcgacgtgacgggggaagctgatgtgaaagtcaggttttgactcacaggtcatccccaagagagaaagttttaagtacttagggtcaattattcagggagatggggagatcgacggggatgttacgcaccatattgggatggggtggatgaaatggaggttaacgtctagagccctgtgtgacaagattatgccaccgaaactcaaagttaagttctatagagcggtggttagaccagtcatgttgtatggggctgagtgttggccagtcaagaattcacatatccagaagatgaaaatagcagaaatgaggatgttgagatggatgtgtgagcacactaggctggataagattaggaatgaagacattcgggagagggtgggcgtggctctagtggatgacaagatgcgggaagcgcggcttagatggttcgtacacgtgcagaggagaagcctagatgcctcggttaggaggtgtgagcggttggctttggcaagtacgagaagcggtagagggcggcctaagaagtattggggggaggtgatcagacaggacatggtgcggctccagattttcgaggacatgactcttgataggaaggtgtggaggtcgagcattagggttgtaggttaagggtagtcgagcggttttcctctttgtcccggttctcctctttgtaccgatgagtatgatagtgttttgtctagcactactagtgatttatgttttgtttcatacttttgcataatatttatgttactgattttccatttatttgttgtctctcaagttgctgatattatatttttggttttgttgcacagatctattgtctctgagccgagggtctcccggaaacagcctctctatcccatctgggataggggtaaggcatgcgtacactctaccctcctcagaccccactgatggaattttactggattgttgttgtcgtaggaaagttatcagagaccaattttatttttatcaatatatattttctaacaaattaaagaagtaatatgatcctcctattaaatactgaaaaaatccacaatatcaattttttactaaatatttgtgttaggtaaagtgaaagacattttcattaaactaactagtcactagagtcaactatatgtatgatatgatcttccctacaatgaagtgtagtacctaatattaggcagctccaatatgaccttccctcgttgtttgtatatacatgtattctacatataacttttttatttaattatggttaagtgacatatagtcactttaatttattatttgatttgatataagtattaggttcaaactttacaggtagcacgttctcctatagtcaaattttttctttatatggtaaaaatcaaggagacccgattttatgggttcgaaggtgtacctcgagagtgaacctgtatcgacggaaattcgggcttagagaatatgaagactaagggatcgagatcaggctagatcgacaccacagtaacagaatcacgagatatccgcaatcgaacaccaattccggcgagaatcccggaatcggtagaactattaacggttaatgatatcaaccatgtattttacttccgaaattagagtcataccttatttaggattcatctactatataaagaggaactctattcatttgtaaacacattatcacgattatcatcatacacgagttatgcttacactactgctgagaaacacaagcactcttttgttcgctcttaactctttatagttcatattgttcatattgttattgttgctcttactgttcttggcacttgatctcgagtataatccggatcgagtcgataacttgcaaaccaaacgggtttgatccatttaaatcgtttaattcctttatttatttagctatttatcaattgatataaattagatcacatatccttataactacattacaaatttaattgttactcgtattacgagataaacaataatgtttctcatgtttataactctatcttatacgactacaggttattaaaacaagagctacaaaatccagtggttcgacatatattcaggaaaggaaatacaatgacacattttttggcaaaagaaggatcaaagttggccaaacaatctcctacttagtgttataattctgtatttgtaaaataattctggaaataataaaataaataaacataaatttaaacgtaatggaaagttaatccgagctcactgaattcacagtgtttccttaaggaatttaatcccctcctagtacccaaggttatggattatttcctcccaggatagaacgaatttcacactggtgtagtggtacttcaaaccccagtctttcagcgaactcaaagttcggtagcaaatcacacttacttgctttctttgaagatgaaagtatgcagaaagaaggaggagaactcagaaattagtatgtaaaatctgagagaatggacttgtatttatagccaaagtttggctgaaatctgaagaggtgcaactcttcataatggttgtttttacaaaaacgcccataaagtaaatgtcatgacataattggctatttactcaatattacaaaacgtaaaactaaattctggataataactgaaatggatttaatattaatatttattttaatattaatattttgatatttactattaacaaataaatttggtccaaaaaataatctctcgatcatttgaccaaatccgaatccgaatccgaagccaagccgagcgagcgacgacgacgacggcgcgaggcttgctttcttctcaactctttattagctagaagaagagcaatttcttatatacccatcaaaagtcttttcttcttcctatgtgggacaattaaggagggaaactcaaatattactcaaatattttattttcccctccatttcccattcacccattttaagcattaaatacttaaaatcccaatacttagtaataaataaaatctcctatttaccaaaaaaaataaaaacaattgcgtcaaaatagtttaaaatggttaattctcgcacaaaagttgtgtactctgttctcaatgtacacccttcccgtgtacgtacatatgcactaattttcctttagagcccgtttggaaagccactcatgaattgaatttgggtataattatatagttggcgtgttcatttggcgaaataattaattgatcagtatgtaatttggtgtaattggagatgtgtaattacatttttcaattctcaagggggagtgtaggggtgtcagtggatatttaaaaatcgactaaatcgatcgaatcgtaccgtaacgaactgatttttaggtttcttttaattaaactgtaggtttttatataaatatgtaaacgtattgatgacgtccaaatccactactaaaaagcaaatggacacggtcgcatacaatataatttacccaactatgagtcggggtcgaatcccacatagaacaatacgtaggtgatcacgctcaactatgtctaataaaagactaagcggacgttgcaaatataatctgagtattttgcccagagtcgaatcccacagggaactaacgtatcaaatgttgttgttagactactagattctcaataatcaattttcccaaaggttatgaatatcactttttggtatttttactactacagcagaagaaattaaacaaactaaaagcaactaatatttagatgtaaacagatgcgataaaggtctaaggttatggtttttcccgttgatgaaatcccttcttatatatttcctatagttttggtttagttatctctatcaatcatgaacactcaggctatcataaatctctctcaagtaattatgataatctactagacgcactcgctcaagttacgctagctaaattgcattacagttcactttagattgcacccaaggtgtcgttatctctaatccaatctttaaaccctcggttatggatctctcatatactccgggagtgatgttgttcaacaattacctaaatatgcactctctctctcgagtagatacacactaaataggaacagataattgcgggcccctcaatcaactacaacaataacgtagttgaacaattagagattgaaaaccaagaaaaactatattaagataacaataagttcatcctcaacaggttccaccaaaaccttagattaaagaagttagctactcatactcaaacacaataaaaactcaaaagaaatcataattctcaaaataaagataaaagaaagagaatagaaaaactctaattgttgcttgttttctcacacttgttcttgcctcctacttgagtctaaaaacaagcttggttcccttttgggcgagttttgtaaggtttaaatcgggttaggcaaattattctcgtttttggcactttggtccttcaattttctgtcttctcagtactggcccgcggccgcggcaggaatgaggcgcgaccgcggtgaaacacccaagttctgaatcgcgctgccttgcccaccgcgctccagccgcggtcaaccgcggccgcggtgggctctcttccagcaatctttgcctttttttttgttcttttctcacgggttcttctcgattggccttaaactcacttaattggctccaaaatgctccaaagtatctcccatcatagattatatcctgcaaagcataaaaacactaatcagagcattttgttatcattatttgcactcaaaacataataaagtatggttcattaagggtgaaaatatcatctaaatcgcctactatcagtaggtgattaggtgtgtaagagcattatcacgtattatgctaagccaaacacttaaaatgtgattgtgaagatattatagttaaatgcagaaatataaactaaccgagagagcaattaaaattatcaatggctacaagcatggatgtatagtgaattacactcaagtaacgatccaatgtatttcacgattttacaaatacgagcgagtttatgttaattagcctcgggtaatagttctatattagcttcttctgaagactaacaagacttcctaattgaattatccctaaaataataaagagattaagcacacctgaatatggctacacgtagttcaatcatatccctaggtaaaatctattaagtgagggttaaagtctcaagttcttgttaattaatctctctcaaccccaaattatctttcccaaaattaattcgaagtaaatgggcgagtcctagggttagctaatccctttgggaacattaaagaacaagaataattaaagaaacaataactcacttcatgataaataaaaatcattcaatacataagcacaacaagaaaattaatccataatatttccataaataagattcaagtgttggaaaaaatattacacacctaaatattcaatacaaagcaaggaaataaagaaatgggcataaatgagtaagaaattctcaaccaaaagcttcaaatcattaagatccaagtgtgtgtgcaagaacactagctccaaaacttcttttctcttctcaagttatgtcaaagatgtccaaagattaccaaaaatattttacaagtgagctaggtcgtgtattaaatggttttggggtcaaaaatgtgaaatgccaaaattgtctagatttctgcccaaatttatgaatcgtgttcgctaaatcaagcatgcgatcacgaagagtaatgttgcaaagcattgcgatcgcaaaccagatcacgcgttcgcgtagagcacctaaagcagctgaccagcttcttcttcgcgttcgcaggatttgccctgtgttcgcgatgtatagtttcctggccttctgcgatcgcatgtcgatgttcgcgatcacgaaaagcattatctggcaatagtcatttttcatcaatttaacacgttttgacttggtttcttctgtatcttctctaaatcacttgatacctgaaaatatgccaataaatctcaataaatgtcttagtttatcaacaaagtcatacaaaagcttaagtatcaagaagagataagttggtaaaataccaacttatcacgtaccgataattaggtaggttttatattttattgaaaataaaccgaaaaatacgaatcgtaccgaataaatttatatgtgagaaatatatttatatattaagcttaaaaataatgaagcattaacgttttcctttggcttcagaattatgaaagcggttacaagtcaacaagtaactaaacttaaaatttcaattcctcaacctattatgctacttctacaggcactaaattatttgcaatattaactagcaagacacaacccccccccccctcctccctctttcttctctcttccccacgccttttctttcttccccctattttctgtttcgcgtctcccacgtgtcattcatcggcggaaaattccatctggcgaccccacttgcctctcctctttctttcttattctctcccccttcctctaaatgctccttttgcgattttttctcttctcctgctgctctcttcctcatctcttcttgtgctcaaatttcagtccctaaaaccctaacagctccgtcggcgacctccttggttgtccctatcttctcgtgtttgtccaaattgctcatattctcactcccctttcccctcctttgtgttttatacctcgattcgtcgaccatatccattgcactcggcgacggtctatcatgtagtttagttggaaagtctgggctatcgtagaactaaacgggtgcagcggtgataggttgacagtccccttccccggttggattcgcggtggttgagagtgatttttcaaggaactagccgcagctgttggagatgagcatgaggcgtatagtcaagttgagtggagcatccccagctcgtgtgtgcaaaggctggtggtagttggaaggacgtacgtcaaattccgcgaccttaggtgtgcactaactcatatctctaggttcttttcatcgggagttagtacatcccgctttcctgtttctctctttgtgatagttaaattgtgtcaatgttgttagcattagtctaagcatattagtagtgtgcctatagttgcaacttgctatcttctagttgggtcctattctgtattagtgattttccgtagtctaccgtaggtatagtggatttggtctgggatgatagagtaaggtcatgtcctcgggggatacggagggtggaatagggggttatagggtggtactggaggtaaggagggtgaggggaacaagggagcttgtaagttggggatcgggtcacggaagataggctcactgacgggtaagtctattgagttggcgaagatcctccagaagaggaaggtcaatatagtttgtgtccaggagactaggtgggtagggtcgaaggcgagagatgcggaggggtataagtcgtggtattctggagtcgtgaagggtaagaatgtagtgggtattttggtggttagggatcttagagagtctgtggttgatgttaggcgggtcaatgatagactaatgtttattaagttagtgattggtgagtgcaccctcaatgtcgttagcacttacgcgtcgtaagagggattgaatgaggaggttaaaaggcgcttctaggaggggttagatgggattgtgcgtagtattccacctgctgagaggttatttataggaagggatttcattatggccatattaggtcgactgttggttgctatggcgaggtgcatggtggcttcgtctttaggatagaaatggaagaggtacttcgctattgatttcgctaaggctttcaagagtgaggaacatgtagtaactttccaaagtccggtagtgaagactcagattcattacctcctcctcaggatttgtaatagagggttgtgcaaggattacaagtttatacatgtgagtcgcttgcgactcagcataggctcttattagtggatgtcggtgttatgataaggaggaagaagaggtatgcttgagatcgattgaggatcaggtggggagccttaactaaggataaatcccaggagttggaagggaggttattggctatgggagcctggaggagtagtagggatgcgagctctatgtggtcaacgacggtgaactatttaagagaggtggcgagagaggtgctagggatgtcgaagggttactctaacaggcaccaaagcgactggtggtagaatgaagtggtccaaggcaaagtggaaacgaagaaggtagcgtatttgaagttggtagggagcaaaaaaaagaaggatataagagtgaataaggtggtacaaggtagcgaggaaggaggcaaagctggcggtcacgaaggctaaaactgcagcgtttggtcatatgtacgaggaattgggggaaagggtggggataagaagttgtttcggctggctaaggagagggagaggaaggcgagggatctagaccaagtaaggtgcatcaaacacgaggacaatagagtattgatgggggagtctcagattaagcagagatggaaaacttactttcatggtcttctaaatgaggagggaaccgggatattgtgctagaggatctagggcattcgtagagtctatgagactttaggtgttgtaggcatattaaggaggaagaggttgtgggggctatgcgtaagattagtaggggcagagcgactgggccagacgaaattccagttgagttttggaagtgtgtgggtagagcagagttggagtggctgaatgggctgtttaatgttattttcaggtagaagaggatgccgaatgagtggagctggagtatcgtggtaccattgtacaagaacaaaggtgatatccagtgttgtaacatttataggggtatcaagttactaagtcataacatgaaagtttgtgagaagatggtgaagatgagggtgaggaagacgatgtctatattcgacaaccagttcgggttcatgtcgggtcgttcgactatggaagttatccaccttattaggaggttggtggaacagtacagagataggaagaaggatctgcacatggtgtttattgacttggataaagcgtatgacaaggtcccaatgggtgctctggagatgtctggaggcaaagggtgtgttggtagcttacattagagcgatcaaggacatgtacgatggagctaaggctccggttaggactgtgggaggcaactcggagcatttaccagttgttatggggttataccaaggatctgtgcttagcccattcttcttttccctgtgatggatgcactgccacaccatattcagggggaggtgccatggtgtatgttattccctgatgacatagttctgattgatgagacgcaagacggtgttaacgagaggttggaggtatggagacatgctctcgagtctaagagtttcacgttgagtaggactaaggcagaatacgtggagtgcaagttcaacgccgagtcgagggaagtgggcatgggcctgaggcttggatcataagtcatccccaagagaggtagtttcaagtacctagggtcgattatacaggggggcggtgagttcgacgaggacgtcacacaccgtataagggtggggtggatgaaatggaggctagcatatggagccctgtgtaataaaaaagtgccactgatactcaaaggtaagttttaaggagcggtatttagaccggacatgttgtgtggggaagagtattagccgattaagaactctcatatctagaagatgaaggtagcagagatgaggatgcatgttgaggtggatgtgcgggcatactaggatggataagattaggaatgagaatataggtgtgacccctgtggataacaagatgcgggaaacgaggcttagatggttcaagaacgtgcgaaggagaagccctgatgatccggtgaggaggtgtgagttattggctttggagggtatgagaagaggtagatggtggctaaaaagtatcatggagaggtgattaggcaggacatggcacatttgcagatctccgaggacattgtccttgataggaaggtctggtggtcgagcattagggttgtaggctaggaggtagtcgagatttttctacttcgtaccggggtgaggctagtttgatagggatgatcttagacggctagtggttaatgttgtgtccacactatccttctatttttcatagccccgagccttaattactggttattgttattgcatgtcatctattttatggtttttatgatgttgctactatttttatggtttctgttgactgtactgatatattatctcttctcgttttctttcagccttcatgagccgaaggtctatcagaaacagtctctctgctccatcggggtaggggtaaggtctgcgtactcactaccctccccagaccccacttgtggaattttacggggtcgttattgttattgttgtgacaaacttgtcatgtaataagtgatgtcattaaagtagaatctcgttgttgaatgagttataaacttattatatttcctaatcttaagttgtattggaacttatttttattatgtaggaatttgacatatgttaaactattttattttttttagattttgaaattgtattatatttatggttctaatttacttgttttagtagtattgacttgttatttcacattgcacattattcattctttagttagaattgatagattgattttgtcaaatatttgaataatgttatgacattatatttataaatattaatttattttatcaaacatgcattccatgatgttcttacaagacgtatgtttttagtttttataattaattaaactaaatattattaatttggaaaatatatcaattattttaccatactagttataaatatatgattattaattaatgtgtattcaagaaaaaatatgcatcttaaatatcaaatctaatatcatttatacttatggaagaattatatatataagtgacaatttaaaccttgaatcacccctcaatgatttatctttttctcactttgttgatagtggatgagacgtaatccatatataaacgaatagaagcaacaacaacaacaacccagtataatcccacaagtggggtttggggagggttgtgtgtacgcaaaccttacccctaccctaggatatcgaggttatttccaatagaccctcgacatccttctctccaagaactctccatcttgctcttggggtgactcgaactcacaacctcttggttggaagtggaaggtgcttaccatcatagcaacccaccttgtctataaacgaatagaagcaaaaaataaaaaaaataacaattaatgatagtggtgtctgagccagctcgcgccatgtagactatttcaccaaaaagcaaaattattgtcaacagtagatgtatcattgacattttgagaacatcatttacacaagtcccttaagcattttaagatgttttccacctatacacctttcaagaacagcttccatcccatagtacagcaaattgtaaaaacacttccaacaccatctaaggataatttatagtcgaaaataggcaaaatccaaagatgctggaaacaaaacttagtaactaaaaacgccaagccgggtaattcgcttcattgttctcctcgtagggtgctgtcgagctgcttcctcctctctcagcataattgccagtgttttggttggatgagcgaaaaggccacaaaaatgaaaaggggttcctcctcccctggttctgaccggtattgtcccgactgctactgttgctgccactgctaacatttccagttcttgaactccaattggtcggggcacttccagaaggtcgcgaaggaagctcaaggcggcaaacagggcacgagttgtgccgaaccaaccaaggtacaatacaatctgcatggtaaatatgcttacatggcatctgccttgcttcagaacccaattcaaagttatcttgacaaactgggcactgagaatccgtgttgaggtgcctctgtgtgatcttgacagtaggcaaggcatctattgccgaacgaggtgctgggggtgggccctgcctatcattcatactgagctgctcaatcaactgttgcagcccaggccccattaaatcatctaaattaggtcgccgctgccccattcccggacttccattgaagaagtactcaaatgcatcattttccgtcatactaacaggagtttggccgtgaaatatcaaccatggaccagaaccaaaaccccttccttgtccaggaacaatgccggatcttgtcctaatgtcaaagttcgggtttcttcctgccattctctgcctcatgaattgagcaagggcgtccattataccaaatcttgggtccgggaaaggatccattaatccaaaatgtggatcatcctcaatagtagatctagcacctagcatgtcatcaagctcttcaacgaaacctccaccacaatttgggcaaagacagctagaccctcgaggccgaattggttgcctgcatctgtggcaccagtgtgtgtagctcccactcgacatcccttataagcagtttcctgaacaaaacttgaaacttttaaaccacgctgcagatcatcctacatccacaaactaacagttcaactataatagagattattaccagtttcattacatgaaataagacaatcacttcagataaagaatcaggtaatgcacaaaagtgatctcatgcgtcaatcacattcaccaaaaaacgtcatattagaaccgtaaccccccccccccccccggccctttttgaaaaggtctcgcttttttcctgtcggagctggtgaatccaacccatccaccaccacaacccccccccccccaacaacaacaaaagaaaaaggctcccccgcccagagacctttcaagagaatcgatgacaatttgtactagtatatctgagacttcttgattagatcaatgtaaattgtggtttatcaacttcttccgtctagaggaaccctcactcgtcaagaatgtggtgcttttttttaattattattatagatctttgcgaagatttcttaaagagggtaaaccacaaatttgagcatacttctaacgaaaccagaattataaatttcactaacatttaacttttgtcttcatcctcaaaaccccaattatcaatttcactaaaatttcagtggtcggtgcaacactacaattgctccttgttccatagaacatggattttgagcaatggatacatcctctttgcataaattcaaggggaaggcagcatagtatatgcacacattcccccccccccccctccctatcctgacgatggtggcgtacgagccagcttgtgcaaagctcgacaattccacgaggtacctgctactaggggcgaagccaccttttgccaaggatcgtcgaaatacaataacatacccagtaaaatctcactagtggggtccggcgagagtagagtgtacgcagaccttacccctaccctgaaaaagggtagagaggcttttgacaaggattgttgaaatattacgaaaaattacactgtgtatataagtaaaatattgattttagatgtaaataacatatatattgaacaccctttgtcaggatatttgcttatttctttcaagtctgaacacccttggcgaaatttctagcttcgtcactgcctgctacctcccacacccttggaagaatacatatttctaagcagaatttaagttattagcaaaatatacagtagctgaccagatataatcaatccaaaaaactaccatcttatgatcttcaatcctcaagatcatacaaattactaacaaagctagctcctttacactttaatcaaatcacagcatacatataacacaaaatcttgaaaaaagaaaaaaaaacatcaaaaatatagaaaaaaaagaaattcacaaaaaaaaaaaaaaaagtcaacttaatggaaaattggaattaaaacccatgaaatattatgtaaattaaaattgagatttgagttcttaccaagaagatgaactgaagatgaaggtggaaacagtgagtgagagagagagagagagaaaatggaatgaaccctaaaagaaaaaagggacaaaaaggggatgagatatgtgctgttttacagtagatatgtactaaagtgtttcctatgtgcattttttatttatttattttatattttctcaccaactatatgccaaaatggtgattggaaaggttaacaaagttaatcattttgattgcagaaagctacactttggtaccataagtttgtgtttattcaagtttgaagtgaaaagagtactacatgcgaaaatgtctggtggttagtaggggtgtacaaagaaaattgataaatttgttggtttgtaagtaacgataagtaggggtgtacaaaaaaattagagaaaaatcgagattgaaaaacccgactttattgatttggtttgatttataaatttaaaaagggaaacttacacaaatgtcctaaataaatctcaacttactaacctctagccattagtaatagacttaccaaaactagccaacaaaaaatgaaaaaccaaacaattgggttctttccctcaaagaatcacatgtaaaaatcaccttccatatttttaagcgtgattagtaacactagatacaagaaggaaagaaaatttcattgatgaggtagcaaataaggtgatgaaatacaaaatatatacaatattccaaaaatctaaagaaaaaatgaactttttcaatgggtatagttgaaattcattgaaaatatatagataagtcaatatacaaaatttgagaaaaattggaggtgatttggactggttttgtatcaaaattcgtaattaaatcgaattcaagaaagtcttctgcgacacatgtatcaaatatatatcacgcatgtatctcacacacgggtatacatggatatacatgtgatacacagttgatacaaatatgatacatatatgatacacaatgtgatacacatatcatttttttcatgttcagtttttacttcgaattttcgattcaaactacctcaaaacttcacaaaatcatctcaaaactgagattcaagctccttaagttgttcccaatctatcctaataacacctactcaaaacaaagcaaaattttgatatttttctagctaattggttaatttgcctaatattagtaatattttatcaattggccaatttttgtaatgagatacttctaaatagacatagctggtaattttccatttaaaaatccgacaccattagtttgatttgataattgaaaaatctgaaccaacctgacatatgtacattaggggtgtacaaatgaaaccgacaaaccacaccagcccgataatccgagtcaaaccgagaaaaaaaactcgactttggtttggtttgatttggtttggtgttgggaaaaaacccgaccatatttggtttgctttggttttaactaaaaaaagtcaaaccaaaccaaaccaacccgacattatatgtatagaagttttaaatatatttaatgcataaaaatatttatgatagagtgtagtttataaatatttcttaaactttttcataattttatcttttaacgtattatttcaagcttgggcttataattgttggatgctctaataagttttatagtacataaatgttagtaactcaaataaatcttaaaccaaaatcaaatcaatattaatactaattaaagacattcaatttgattgtactatgaatgaaaatagtgttggatatctattttttagttttttccattgtttagataaaatgtataatttatttttcttttaatggttagtcatgtaaataatagtggtacttattagtcataattttaaattatgtttgtttacattatggcttattaataatatttattttatgcgattttattatcattattgttgaatattttagtacaatgccatgactcatatcatatttatgttattttattaaaaacaccttatatagttctatcttattaggattaaaaaaatatgtggagcacaaattttacattttgtgctatgaagactttgtggaaaaaaacccccgaaaatatccgaaaacccgagaaaaaccgagttaaaaaacccgacttttattgatttggtttggtatttaattttaataacccgatacaattggtttggtttggtaattagaaaatccgaaccaacccgacctatgtacacccctagtggtaaggttattaacaagtcatttttattagagaaaattacactttggtgccataagtttatgtttttttcactttaaagtgaaaagagtaggggtgagtattagtcagttcagttcggttgtgaatgttatcggtttggtatatcagttatcgatttgttatatcgggtatcggttattgatagtaatttgttctgttattagttacccgacacaagaatcaaaatatccaaaaatcttatatttttgttatagatatcgtgatcatactgttaagacaaacgaactgaacttttgttcttaagataagaaggattaaatttcaacttagaaaacaaaaattttctttgcatgtgaaaattccaatgagtaatctcaattcttaaataaattagtaggagtaattaataatacattcaacaaactaatcttactgactacggaaaaatggtaaaaacctaatcttataccaaaaaaaatctaaaaaattaattctttaaaattgtaaaactatatgaattgaagaataaagatgagaaattcagaaagtataaaacaatcaatccttatagtgactttatatacttaagggtataattataatttactatcctcagttttacatcttagactttactctatgacactgcttaagcactatttaaataattggtcaagttggactttagatcaaaatgattaattaaagtccatttagaacttattgactcaatccttttcaagtttaatgcttaagatattgactatctcaaattaagtggattggacaagtaatcagattacaaaaacagaatggtccctcaataataaaagaactgagatgtcagggtgactgttcttcaacagaatttaatccatctttcgttttagccataccaatttgtgcatgtctaaatcagagtacattagaaaaacttagtataatcccacaaggggggtctatgtagagatggcaatggggcgaggcgggcgcgggtttggcaaaacccacaaaaatatcaacccgccccgccccgcatagttattttttcagttttcgccctgccctgccctgccctgccccgtccctcttaattctttttcttttttctttaattttttttctaaacaatattgtttatatattttgtcttcttagtatatgatagatgtataattaggcacatagtttaacactttaacttatttattttattaaagaaaaatttggtgacatttaaaaatcgagttgacagcaaaacatgatataaaaatctaaaccttgaattattaaattacttaaaaatttgttaaatttttataaaattttaaaggtaaaaagtgtcatattaatttagactgaatgaacaatttatccagaaaagcaaatgagttataagttatgtacaatttccctccttttaataaagaccatgcaaaattatttgcagtagctccaagaaaagaaaatagtgtacctagttatagattttcagaaaaaatgaacattagaaatagtagttcgttcgtttgacaattggaaaaaaagacaattttttttctaaacatttgtccctcaattggataattattgtcaataaaaacagtattgttcgttcgttttccccgccccactttgacgagacttatgctaattggtttgttataaattaaaatagtattcgtgctagtgaagaagcatgtgaaattgtagttgaaatgattgttttgtttaaaaaaaagataaaattcaaagttgcctcgcataaacccgcaacccgccccgcacccgcataagagtaaacccaccccgtcccacattaaacaaaacccgtcccgccccattgccatccctaggtctatggatggtaatgtgtactgcatttctgcactatcatagaaatgcaaaattgttaaatagcatgacggaaagccattacaagactctgctctgcgtaaatgaaatgagtagagttattggagatgccgattaaaaaaaaaaaaaaaaaaaaggaaccacacacacacgcgcggcaatttcgtccgatctgccttaaccttggtgggcagagttattcagtgtctatactggttgaaagtaccaagcaacaggtaaatagtccatgtatacacaatgtgtacacaagttgatcagaataccatctttatcaatataaggaagaaagagaacagtttgagccttgggtgggggaggggttgggaacagaagagggctcattgattgaaattttataggactggaatcaacatgatatcataattctgaaagaaatatcaaaattagtagaggctgattctcaggcacattagaggtccaagtagccaggtccttgaacttgcatctctctaattttggcatctgatacaaaattgacataaatttactatatgccttgaaaaggctagggttttggaaattcatttccaagaaaaagagtgcttaatactaaaatacagccattggtaggagctatttgtcatccggccaaagttttgtccgttggtacgccaactgcaacaatgaagactgaagtcattaaactgagacatagaaaaacaataaacagtattctctattgatattcttaaagatgataacattcttagatatgtggagcatgttggtgaaaggtgtttctaagatgccagaagataacacttcatgtgatatgttatttctcatgctcaattcctaagtaagccttcacagcacctcgaccctaccaaacatgattcctgcagactctatcttctactacaggacaaggttgtgacctggtgacagcaccaaatcaaaatgaagccaacttatcctatacttctaaggataaagctcagattgccaaaagtcattgacttgactctgagcaatctccaaagggctaaactttgtttgacaatcaaagaaaacctagcaaaacctgaaagaaactgttacgaataagcaaatgcctctccaacaccagtacttttgtgcaatattagtattgcagtttacggattagtatgcatcatacaaaagctacatcacttgaagacttgagttccaatattaggtactgcattaagagatctactgctacacatagatgatgcatgaaagagtaaacttataattacagagtctaggtgcaattcatgcgctaatccacgaccattgcttcaggacccccagtagcatcctccagcccactcttattatgatcatcaactgcattcctcatctcttcaaccaaactcctctgttcttcctctatcgtgttctgcaactcatcaacctaaggaagaagtttaaacatcagcaaaagatatccacttataccgatcaaagttttctcaaatatatataaatattaagcacttatacaaacgttaactacctatctatcaaacatggaaaatctgacaatcgatcttttacaatgatccagtcacctgctaatcacgcatcagttgcttatcacgggtgatagaaaaatttgaccgaaacataatttatagtaattggaagttacaatagctgcaataaattagagaataattgaatatgtctgaaactgtgaaagctcaaagcgtgaatcgggaagataataggaggaagaagggatcaaattttagcatagcccttcacaatgatggagaagcaatagaagatttgacatgaattaagtccctcaaaatcacagtaattagaatgatcaataatgggtgctatgaaggcccttccaaattctactacgtattccttctaatcattagacactaagctcatcaatcttaagaaaaggaaaactgaaggcatggatggaaaaataagattctttccaacggtcaaatgaggccttgatctaatagtgttgtaattcaacctttgacactgttgactatgaggtctcagttttaagttacatattaattaattatgtgtttgctctccctccactagtatgtaggtgtttatcctagaagatttgacatgatttaagtccctcaaaatcacggtaattagaatgatcaataaggggtgctatgaaggcccttccaaattctacaacgtattccttctaatcattagacagagctcatcaatcttaagaaaaggaaaactgaaggcatggatggaaaaataagattttttccaacggccaagtgaggccttgatctaatagtgctgtaatacaacctttgacactgtgagtatgaggtctcagtttaagtttcatattgattaattatgttcctaagccgagggtttattggaaacaacctctctatcctcctcacaaggtaggggtaacgtctccctaccaggaccccactttgtgggataatactgggtatgttgttgttatattaattaattatgtgttggctctccctccactagtaggtaggtgtttaaccgaaatgtaaatagaagtatagaaccatagctgatttctgaaacaaagatgggaagagatctcccaccctcatctccaccccacccctcgcggatggcgggaggaggaaaaaaagaatattagaatagccatacataaaagaaaaggaggttgtgacgcccataacggagggttggacgacacggcgggtcatagaaggaccggtagactgacttctagctgacaagcttctaaagaaggagcgcacatgacaccttaggtgaattccaatcagagtgggagaggaaagtgaagagttttataaagcatcgcacaagttcacatggtacgcgcacttttggacacgatgatggcgtagcccaagggacaaatatgtggagttggttgaaccaaagcggacaatacgtgtcatgagcttaggttgtgacaaatatggtatcagagccggatgatccctcagtacgatggtggcgcaaacctcaacgaggacgctaaatctgtaacggagatgtatctgacgcccataacgaaggcgggccgacgagggcaggtcatagaagaactggcaggcttctagctggcaaacttttgaataaagtgacactttaggggaatcccacatctcaatgagagagtaaagtgaaaagctttatcaggcatagcacaattttacatagtaagcgcccttttgggctcgataatggcgtagcccaagggataaacccattaggtctattggaccaaagcggacaacacgtaccatcagctacgctaaacttacaaagtaaaatgataaatacaaaaaaaaaaaaaaaaggtaaaggatattggaaataatttcgatgattcaatttgtgggccacaaactctcagatgtctcctaaacataaactgcaatctctctctctatatatatagatgtacatacacacattcacttcttttattgtagtattaggtatcatgcagttttctcaaaatgggatttattttttattttgtcaatttgtagctctacacttatcatgctcataaggcgaaaatactcaattttgatgagaatgttattccaccaaatgccatagtacaacaactaaggcttaattccagactatctgggattaactatgtgaatccttgcaatccacttcgatgcattagacccttctcatgctaatattcaatcaataaggtcttctatcccttaaagttttctacactttctcctgacatacacatttttaacaatatcaaaatactcctagcaaatattggagaaaatcatcttcagcaatattcactcgtttattttctgtgtatgctacttgctccttctgtcggatgtgcaatattcactcgtttattttctgtgtatgctacttgctccttctgtcggatgtgctctctctgccccaatttatgtggtatttttttattgaacacggagtttaagaaaaaagtgaatgaattttaaaacttatagtctaaaacatgtcatagacatgtatggatataacatcatatcacttaaggtaaaatggaagtttaaagttaaattatttctacatgtataaaggcgccattcatttttggacagactataaaggaaacataccacataaaatgggatagagggagtactaatttctaatcttgtatgattacacatccatcttaatatccgtatttctgtggtacccatcttatagatatattggaccttagaagcttaatattcacttccataaaaactaccggctttataactttctattaaacttgcatttcactttggcttgtatcttcatatcacataataatctaatagcacttctccagttcaaccactatttaattatgcattacaccttcatatcctcctggaacatcaagccaagataagtaaaactgtttgtatttaggcaccgtaatcccgcctaatctcacatcaattaaactcatctgatttaaacttgcaaggcatagattatgtcttcttcttttatcttgtacaaactctgagcaccatagtgacgtagtccctcctaatctcacttcagtttaactcttttgatttaaacttgcaatgcgtatattatgtctttccttttttatcttgttttatgaatcggagcggctagcggatcgtggcagaaataatgcacatattatgccttacttttacgtatcctaataacctaattttttagagttcttctccgtagttcaaacttttagtcacttaacaccctcgctaatttcataacagaaacgtcttctgcaaatagcttataccataggatcttatcttgtatactgttagttatctcatccataattaggatgaacaagtacgggctcaatgcaaattactggtgtagacctatggttatagggaactcttttatgtcttaccagttaccacaaatttttaatgcggaggtgatctcttaccgccaattaataatcttaaagtccattctttgagtagcttatattatgcaagaccacattgttggcaaagcactgcaagaggtgaagtggaataagataaatttggtagcatgccttctcattgtcaaaatgcacgaataagatgaaggaagtcaaaaggaaacaaaggaaaatcaattatgttctcttccataatcactaattctgccaacaagaatcagcaaggatgctgtagactgtttcttcttatcttgtaattatgttcaagttacgaaacccttcatgaacattcagatcatgtaacttgaaactgtatatacccccaataatgccaagggtaatggaaagataataaccaacttaagaaattaaaatttaggatagtctcttcagaattattaatcagacaaaaatacttaacaccaagtttcccagtcagtcttacataactttcacgaaacaccgttgagatatactaacatttgatgatttaaatacatagagaaaagcaactgttttccaaaaaagaaaaaaaaaagagtgtggtcgccttttaggtcagaaaactagaatgctaaggcaatgatgagagcaactgagtaaatttcagaggatttcaggatatactgaataaagataaacagtactagaagcaagtaaagtaaactttgaaaagcctgggattttctcctactgttgttaccttttccatataaattcagcagagttttaccgtcactttagcgacaattagagagttgacggtaataccaaaaattcaaaaataaccgcagtcaaagccaatagggaaagtcaggtcaagagagtctctttccgattttacaggtttaaagtacaaaattacgaatgtgaaatcagaaatgtaaatgccgaagagaaaagcttattgaaggagaattatcctgcaattctctaaacaagttggggacctgttggtcagtggattatgtcagttatctctaattcatacagtctttagctactataatttaatagaagctattcatgaatttccagtgaaaaatcaacagaacaaactagatggtttttatagaaagatatgtaccacgtgtaatagaagcgcaaattgctttttacgaagctccaacgttcttgaactagcagtattctctgcctccaacatggctatctctttctcaagatctgtaatatccttctgagtttcagatcttggaggctgcatcgcgaccaacttcctgatggcctcgcactcttctttatgctgcctctctatcttgctttcttcaagttgcctcttgagatcttctatatcggcctgagcttgtaatatttgtccatttatctcatctttcaggtcattgaaattctccttctctctaaggtttgcgtctatgactgctttgctctttaggagcgggatctcaaatgtatttagctcttgcaaaaaagctttggcaagtttttcacaatcgccatagttatcagcttccttctctacctccgaagcaaaagcagtaaactttttctgaagtttcttcaacggcggttcacctctagtggttgttgtgcgagtaagaagtctatgcttaataataaaatcatcttcaagtgggccaaaagcataatgtgcagcaactgtctcccccttcccagcaacttttctgcctctggccaacatttagttttcctatcctgaaataaaaaccatctccgacagatcagcttctgatggattccaaagaattttggattaagtttccagctctgaagaggtaaataacagaaataggtgttctccacttctggcgtaatcaggatactgaataatttatgagttaaattcagattcggttttcgaagtagcaacctctctgagtgacatctagaaaaaaaaaacagcaagatctatgcagaagttttcctaaacattgtttgatcaactaaacctcgatcccaaactagtggtagtaggttatatgaatccttcttataaaatctttagagatttatcatattatgactatatttaccttgcatgtcaacttgctgcaatcctcctcctccatttaggctcagaccagctacccaaactcacatagacagagttcttcactaatttttgttagatccagaaaacaatttgtaatcactgaatttggtaacaaacttgaagagtagaatacactccttttctcttttgtaggtaacttgaagaataggatctttccacaagggagattccctaaagacgttgataaattaaaaggtactctataagaatacgtgaaggacaatttggcacgtgcagaaagaaaaactttgcagaccaacaaaatcccattgagctccgcccatgctagtagcacagtgtaaatttaatagtaagattttaacagcctctctaccccacggggtagaggtaaggtctgcatacacactaccctcccgagaccccacttgtgggatgtaactgggttgttgttgttgttgtataatagtaagattttgccctattcgcacagtgtaaatttttgacaaagtagattcaattgaacgcccctttcttcaatttagctccggccatgctagtagtttataggaacaccataagtcacctacttctatatccaaccaaatactataaaatgatccaaaaataacttctcaagatacaacatttttcaaggaaatccatacaaaatgcacccctaaacaaggacaatttatagaaatcacaaaaaaaaatggtgagctacaaataaatcaatagtctgaaattggcaatatgaatcctccaaaaccattttatttgtgaactataagtaaatcaattacagctacaaacgacaattactgtgtgtgtgtgtgtgtgtgagagagagagagagagagagagagagagagagagagagagagagagagagagttatacttgaaagtgtgagatagagaaatcgtcgcgggcaaaaccctggtgttcttcactggaaaatcctttgttcttgctcctcgctatagtctgacgattaagggcgagatctcaggggttttggcttcttttttcttttgttcttgtaaaccccacttctgtcttcttcttcctttttttccctttgataaggttaatcttttattgtttcttttcattttcttgacccaaaattctatccaaaatagcttgattatggtaatagttcaatttcaattttttgtgctagtatattttatatgttgaacggactaagcagagataagtattttatactgacttaataaaataaactctcaaattataaatgtactaatactcttaattttgatataaatattattattagttgtgtatattattattgttttgatttattaaaaagcgagattctttcgtgggtcaatatacctggtaatttagataataataataataataataataataatgtacattggcgaagtaatagttagttgatggaatccatgtctcggtttagagattgatgatacacctttatgaaagcttataactttacatgtgtaaacccggcaagtgaattttgtacccgacacatgaaaaaagttaagcgaaagtctaatggaataatcaataaattaaatcaacagtaatttaatttaatcgattagtatctgaatcttaacatggggagttaaataagatttaatggatgaatttcgaaatgaataaggagtgcaattacgaattttttcgtaattaattatggtggatattaatttcgaaaattataaattaatttcataatttgaagccttgttaattaaattatgttgtgtctaaataatagaaagaaaaaaaaatcctttttttctggtggaaaaaaaattaatagattttggaaaagtgttttaacccttaaaacttgtgctataaatacataagattttccacctagaaaaaagacagagatgatggccgaatttcaaccatattttcctagaaaatttcgcccaacaaaaacttatttgggtaacacagtagaggaccgtgatcgtgcgaatggtggagatttcaacgagacgatgtgaaactgaagactcacatgactaaagagtcgtgttcacgcttcaagaggtaacccgtgaaatcccgtttatattagttgtctagattacatgtgattttgatacttgaattgcttccgttgcatataataattcatcaattggtatcagagccaataatcgcatctaattagactaagtttttcatgaaacaagaatatcgtgtttatgtacgtttttgaattatatgtctatgtgattttctgaaaaactgcactactattttgtgaattaactgtgaaaaaaattgaattattcttgtaataatgagatgtttgttttattactgatatttgattgtgatgatctggatttttttggtaaatcctagaaaaacgcaaaacctgattttgaccaaattgcggtattttcggaggtcaatgaacttgacaatcttcgattgagctgaaatttggtaggtccatcgaaaacgacgtggtgaaaaaaactcactacttaacagtgaattatggtgtttttcggcgttttgaggtcgtttggactctgttttggacgtttttctattttctataaattatttcttaataattttaattcaatagtggtgggggtggctccccatggtctccatgattaaataatggtgatataataggtttacacattggctattaataaatagacgtgttgttgtattaaattcaataatagaaatgtaggattattgactaggtcttacaaggtataatagatattgtgtgatgatataattattttgtaagaaagtgaaatcctttatttgagatcctaaatgactaatgattgagcgtttggtatatttgtgcataaaaaatttctcaaattttagtttatattttcatgccttacgtgattattagtcttggattttcgatgaaaaattttgttttctggttggaggttataattaagtgaaatatgacggtattttatatgagttttgtattattgatatgacttttaaggtgtggtcctgacgtaaaataattttatgagctacatgtatcttcactcgtattgagaattttgtgagtaataaatagttaccactaaagtggtttgtttatttgaactcatgaaatattcttaataaatctgtacatgtaaattgtgtttattcatggattgagccttatgattaataagtagtatcctcaaaatggtttatttatttgagtcattaaaaactgcttaatgtaccatgtgaaaattatccttgataaatctacattagcagtggaggttcttaactagaaaaagagttttatcttagggtactagtgagaataattccacccaggagaagagatattaagtttttcgccgaatgggagaaaatataataacttaggttcttgtgttaaaaataaaatgataatttattgcaaaaggagatatttgtttaaccaaataattagattctctgccaaagctattttaataagcacacgggtttctgataaccaaagaataaactaataattgcaaggaattttgtaattggaaagcaatatgatgcataaaaaggtaaatgtattgcaatagtcgttccaatgtgtcttacaagttatattttattcccttatatacggaatttctttatataacgtctacccttttcagtaattaagcattaatgactaataatgacattaatgtaacgttacaatgattaaccgtaactgttgcacgaaggttatgtaacgtctggctcattaattgaagatctccgaacctgccctttattctgctcggattcattctgactgtgtctcttcatcttctcaatcaggttgagattcatgtagttgattaccccgtgggtatgttattacgtgcctctttgcctcgtacctcgtcatagagtcatgtccagtttttacgtcttcattgctccacatagattgctgaatcatcacaattattacacgtgtgaagctcttttttaccaatacagatagttcccccgcttaccatttatttaccgattaatatttggtaagtggatactcatttatggcgggaatattttaccgccgcttcactcgtaacattgcatccctctctaaatgtaggcgtcgcttgtcacttctatttaatgcatgtgccacatggcattcccgaattggttctgcaattgttcagcgtcttttagggctttttgcggctgcatcagtcacgaagtgacagcttcaattatgactttcacatcactgctttttccattttttgacggttgccttcgagtataaatacctttttccctttctttacttttacgaaaaacttctaaccttcattctttgtttgcaaattctttgcctttgtaaatatgtcttctttaaaccagcaatctaagagagtcatcaatgtagatgatcttactcctttttctgctccgacacagagtaggagaggcggtaggcttaggagtttaagttctactcctaccagaggttcctccccgtcttcttctaggtctgccatttatttatcttctccaagggctagggcttctagatcttcttcaaaaggtagagaacacaatgaacctctgcgtgagccgagggttgatgagtacctgtggagtttttctttgctagggatagtcaggccttaaaagaacaactttcttctatgtcttctcatgacggtgctgacatgtaccctacccagataactaagggtttaatatctcttgtacgcagggactgttattggaatcttgattttcctgttgtcgttcccaatagtaatcaaagaataacttcttacaaggctgggtattcttttgtttatacttatcctttcacgttttaggattcaagcctcacattgaccccgttatcatcgagttttgtcaattcttcaaagtttgtctgggacaagtcggtcctctcgtgtggcgagttgttgcgagccttagatatttggctaattaagcttcggtcccctttaccttttatcatctcattcacctctattctccaatgttgttccgccaaagagtttttactctcgctgctaggagtaaaagggtgttagtgatttctgatgatgataaagaccgagggtggtacctccggtatgttgttgttcctactgctggtttagtaggcgaagaaaatcttcccttccctgagaagtagaatcttgcacgtgagtacagtttttctcacattcctttccttttgtttttgatactttattagtatcgtaactgtttctcttctttgcagcaatcatggaaaccgtcgagaatgtctccggttttcgagatttggtagaaaaactcttgttaaccgctccattataagaacgttcgaatacctctctgggaggtttagttggaaagttgagactcacggtaagcgaagtttcatgttttacttcttccctctttttgagctttatttgacccctttcatttggtagggttttctgctcgtggagtttctgctgcagtcgtgtctgctccaaagttgtccctggcaaaggctcaggagatcatttctggttcctcctcctcaaagagaaaagcaagtgggtctaggaccttagaagaggaggatgaggaggagggttcgttagttcacagatcgcgtaggaggaaggtggtctctgatgactaatctgcacctgtcattgaccctcctgtgatcgattctgaactgtcttcccctgaggatacaactccctctcccgtccatgaaccagttgatctattattccgtgaaggttttggtaccgtcgctgatgaagctctcctgtctattttttctccttctgctcttaaagaacttccctcaattactcatgttgtagtttctgctcccatggctattcccgctcttgtcactgcttctgctcccatggctttttctgcctctcagacttctctgcccgcgactccttcatctatccccgccttcgtgccttctgttggagaagtagagtcttccagtaggggggagatgaggtaggtgatgatagaggttccaacagcgggtagcctcttcaaaaagtcgggccaagctgacgtatggttgaaacccttgataggctcgactgagagagctaagttggacaaccatggttcccttacttgggtgaatgaaattgtgcactcttctttaaaggtaaaatttgttttcctttgcttgtgttcatatacgttcttaccgtatctaatttatctccttttgtagatcaatcttataggcacagagttaatgaagagggtttcccaagcggagcaggcaacaagggatttccgtattgaggcggataattggaaggagcagtacgagagtctggaacttgaaaatgaggcagcggaggaagaaaaatgtaccttggagcagcaagttagggtgatggcagcagaattggccgttgagaaggcgtcttcgaacccggcatgcaaggacaagagcgtcttagagtcttcattcgcggaacagctgtccacgtgcctctgaagagatcaggagcttgaaggccttattggaccagaaggaagagtatttaggtgaacttgttcaatcactaactcaaatccaggaagatctccgcaactctttggagaaagttcaattcctggaaaggtctctcgcttctttaaaaggcctctcatgatgttgccgtgactgagagggatgaattaagagctgaagttgagctgtgggagaaagattatgaagctcttgaagacaaagcagccgtcgatgttagctgggattatatgaactctcgtctcgacacattgacggaaatgggccaagagggttttgacttggaagacgaaattgaaaaaaccaaggagaccattgagaagtctcaacaaagtcaaaatatctcttcacctgaaggtgaggttcctgatgctcgtgtctcttcatcccaagctgctcctcctgccagtgaagacaaccccccatctgaagaagtttaagaacttggttctttttttatttatttgtatcaattggtggttacccccagtcccatcgggggtaaagtttggatcctttaagtccccaactgacaaattaggggcacctaatgtaaaaattaatatggcttagactatggtaattcttagtttattattccattatattaatgctagcatgacttcagtttccttcgagtttttgtttcactcttttaagtttttgcatgctttatttttgaggtttttggtttacctctgagttttgcatttatagaatgcttagattattcgtgcctttccgtaataggcatggtttatgaaagagggccctttttttatcgacacttaatgaagaagacgtctcaatttcataatggtgtaaatatgcaatagagagatatgaattttttcacatgtctttaacaatgtttttaaagaaagtttttgtattgaactttcgtaacatttctcatgtgtttgcgtatcgtctataactcattttgcaactgttttttatttcaacagatttgatataaactaaacttcgtaactgtttttcttttgcaacagttttttcgagttaatacaatggaataactgtttctgtttataacaatttttaataaatacgagggtgatgcttttttatccgtaactgtttttcatttataacagttttttaataggtacgaggataatgatctttcatccgtaactatttttatttataacagttttctgaataagtacaaggatttcgtaattgttttcatttataacagttttctgaataagtacaaagatgatgatcgttatccataattgtttttagttacaacaattttctgaataagtacaaagatgtgcatttctacctcgtaactaatgttctgcctttagcttgaacattcgtttacattcacgaatatgtttttcgaaggttttttgaatcaagctttgtattttgagtctttggctcttttgattttgctcgtaatacttggatctttcaggcttgagcttttgactttttagtagtcttctttgctttagctttgccttccatactgtatagtcccccaagtgtttgagctttgaagaatgagatctcgagcacttgactattcattccttgtggtccttttcctgaaaaggaaaaacatacgggactcgaatgtgtataatttttttaaatgatgactgattagccctttacgtccatcagaaagttgtaaccctagaccgggaattcagttacttcctcgtgtctttgcaggtctaatatcatcatcaggtgatgggttagatttttgcatatcatctaaaatggttagtataattttaactgtacaaaagtaaaattgaatgtaatgatacctgaacgggggtattccttttccttagaagtaatatttcttcaagtggacgacattccagccggttggtaagatcatgtcgtccatagcctccagctcataagcgtctttcccagcaatgccacggactttgtaaggtccttcccaatttggatttagctttcccgcaccagcttctttcgttgactggaagacctttttgagaacgaagtccccaattttgaaatatctgaggtgagctttcctgttgtaatatcgctctatgatttgtttttgagctgccataggtattagcgcaacttctcttctttgctcgagcaagtccaaattggttctcaactcgttgttgtttgtttcttctgttgctgttgtaaaccttgtgctttgttcaccaatttccaccggtatcaaagcttctgatacgtaaacaagcgcgaatggagtttctcccgtggctatttttgcagttgttctgtaagcccataataccgtcggtaactcatcatgctagtttcctttggctttctctaaccgtttctttaggttgttgacgatgacttttttcgttgactcggcttgtccattagccacggggtgatatggtgatgcagtgattcgtttgattttccaacttttgaagaattctgtgatttgagagcctatgaattgtgggccattatcacatacgatctccttcggtattccaaaacgacatattatgtttctccatatgaagcttttcacttctttttcacgcacatgtttaaaagcttctgcctccacccattttgtgaaataataagttaacatgagtaagaactgtacctttcctttagctgggggaaaaggtcccactatgtctatgccctatttcataaatggccatggtgataccactgggtggagtaactctgctggtcgatgtatgttattaacaaaccgttggcacttgtcacatttagctacgaaactttcaacctcttcttccattttgggccaatagtaccctgttctgattagggttttgactaaagatcttgctcttgcatgatttccacagtgtccttcgtggacttacttcatcatgaactctgtttgattgggtccaagacattttgctaagggacctccgaacactttgcggtatagagcattgcgaatgaggcagtatcgtgcagcttttcggcgtagtgcttgagctgcttttctatcttcaggtacggtaccattctgcaaaaagtttaaaattttgtttctccaattccaggttaaattgttaaatgttacctcattttatcctggttgatcgctgagtgaaataagtgaatgacaattacattgtctttgtttgacacttctgcaactgctgcaaggttagctaatgcatccgcttctgcattttcctccctgggtatttgcataattttccatgattggaattgtcttaccaggtctcgtgccttttccaggtattgttgcatacgagtctctcttgcgacataagtcccctgcatctggtttactaccagttgagagtcacttttgatcacgatttgctcgattgagagttcccgtgccagttcaagtcctgcaatgacagcttcgtactctgcttagttatgggattacatttaatagcttgtcgtatcttttcacccgtgggtgatattaaaactcttcccaagccagctccttttatattataggagccaccagtaaataggatccatatatctggattagccccgttaaagagttgtaactctttttctacttcaggaattatgctggtattaaaatcagcaatgaaatcagctaaaatttgagactttattgcagtcctaggttgaaatatatgtcgtgctcactcaattctattgcccatttagctaatcttcccgataattcttgtttatgcataatatttcttaatgggtatgaagtcataacagtaatgggatgacattgaaaatatgttcttaattttctagctgtcataatcagagctaaagctaatttttccagatgtgggtatcttgtttcagcgtctaacaaggacttgcttacgtaataaattgaagattgtttacctttgtcttcccttacctgtactgcacttacatcaattactgttacggcaagataaacatacaatctttccccttcttttgattttgacagcaacgggtgttttgataaatatgccttcaaatctttgagagcctgttgacattcctcagtccattcgaactgattctatttttttaataattgaaagaatttaaaactcttttccgaagacctggatataaatctccccaaggctgcaattcttcctgttagtctttgcacttcttttttgcttgtaagtatattgggtatttcatcaatagctttaatttgagcaggatttacttctattcctctatttgacacaaggaaacccaaaaacttacctgattttacgccaaaggcacatttttctggattcagtttcatattatacatgcgtaaaatatcgaaagtaattgaaagatgctggaaatgatcttctggttgtgttgattttaccagcatgtcatcgatgtaaacctccatcgtctttcctagatgttcctggaacatcttggttactaacctttgatatgtggctccagcgtttttcaggccaaaaggcatgactttgtaacaataagtccccctgtttgtaacaaaggaagttttttcctcgtctgagggatccatttttatctgattataaccagagtatgcatccaaaaagcttaacaattcgtggcatgcagtggcatcaatcatttgatctatgtgtggtaatggaaatgaatctttagggcatgctttatttaaatctgtgtaatctacgcatactctccatttaccattctttttgggtaccactacagtattggctaaccaattagggtattttacctcacgtattgaaccaattttcaagagtttctatacctcatcgtcgatcacttggttattgaatggtccttgatttcttttcttttgcttgacaggcacgaaggatggatcttcatttagtttattagtcatcacttccggtgggatacctgtcatgtatgaatgggaccaagcaaagcaatctgcgttagcttttaaataatcaactaactcacctcttctgctgggacttagcctcgtgcctatgtggactttttgttcaggcttccattcgaatagtggaatagcttcgagctcttccgtagttgttttgatatgttcatcctcttctggttcctgaatgacatcaggtctggaatccatgtctgtatgttttggtatttcttctgaggtgacctggttcaccttctcatgggtatcatatgtcgtacctgtttgaataataatttcttctatacttgtttgagcaacaaatttttccgtccctatgcaatcgtacttgcctgagtggtttccttatcttttggttcttccgcttctttgttacaatgtaccacataatttttactccttgaggtttgctgatcgcctcgaatctgttgaattccccattcggaagggaatttgattacctggtgtagggtagatggtaccgctctcatgtcatggatccatggtctccccatgattaggttataggccatgtcagtatcaatgacttggaacctagtatttttgattactccatctgtataagtgctaagctcaatttccccttttattatgaccatagagttatcaaacccagataaggctcgagcttttgggattactcgatcttccattaacatttcttccacaactcttgataggataatgttaactgggctacctggatcaatcaacactctttttacgttagtgtcatgtataagtaaggatattaccagtgcatcattgtgtggtattatcaatccgttgatgtctgcatcatcgaatattatattgtctgcttccagatcttcacgaatccgctttccgtgcgtaattatgaattttgtggttcttttgcagactactccgtttacctcctcacccccgtgtattacgttgactgttcgttttggagatggtggctttggtggttcctgcatgttcttcatatatgcatgcttacccttttcactaaacaattatgttaggtagccctattttaataattgttctacctcaccttgcagaaatttgcagtctgacgttttgtgtccatggtcattatggaactcacaccagaagtctgggttcctcttatttgggttcgaccttatttctttgggccatcgaaccttatcgcccatatttctcagtcctgcaattaattcagaagtacttacattgaagttgtgctctccaattcttgtattacctctgcttcattcatcccgatcctttctggatcttgatgagtaagtgctcgtatttctatttgatggtctatattctgaccgaacgttttcaaacctggaacgagtttctcgtcccgaaggtcccatataagggtcatacatgttcttacctgttctccttttcgattcggagcgtctagaactggttcgatcttcagtttttgattggccaatagtatcctcctctattcgcagcttggtactatacttgttatagacatctttccatgttgtggcgggaaattctcttaagctttctttgagccttctcgtggcttctgaacttttgtcatttaaattgatttcaaatgccatggcttcccatgtcaggtacccttggtagcatcattctttcgcgttggaacctgtctacaaattcacgaagcaactccatgtctccctgttttattttgaatatatcctccattcgtttttcgactttttgcgcaacggaatgcgcttttataaaagagtctgcaagctcagcaaaagaatcaatagagttttcaggtaaaagagaataccaggttaatgctcctttagtgagtgtttcttcgaacttcttgactagtactgattcaatttcttgtttagtgaggtcgttgccttttaccccggtggtaaaagcagttacatgaccgcgtggatcagttgtcccatcatacttgggaacgtcaggcatcttgaatttcttgggaataggcaggggtgctgcacttggtttccaaggttgtcgagaatatctatcaacgtcaatgcctttgataacatgtggtactctaggaatttgttcgattcgatcattttgttccttcacctgtttctgcaaggttagtaataaatattgtaattctcggctgttggacatacccggtcttgcttcgagggattcgttaagtgtacccccacttcctgagttcactaatccagattgagaattttctacagttatggtgttgttaagaggtggtgtaggtgatgctgtcggtatccccctcacgaagtcttgtaaggcttggtttacatatccaacaatcatttgtttcacctgatcttgttctcttgtttgatcgttaccgttattattgttgttttgagtagtagatctttctggggatggttcccttgaacctcgtggggttccagtaggtgatggaactggagttccaatcctctattggttgttatcgttggtgttcgacataattcaaagaatgtttgtttgaaagtaaacaaagattatcaaattccaggtaacggaaccaatttgtttaaccaaagaattagattctctaccaaagttattttaagaagcacacggggttctgataaccaaagaataaactaataattgcaaggaaatttgtaattggaaagcaatatgatgcacaaaaaggtaaatgtgttgcaatagtcattccaatgtgtcttacaagttatattttgttcccttatatagggaatttctttatataatgtctacccttttcagtaattaagcattaatgactaataatgatattaatgtaacgttacaatgattaaccgtaactgttgcacgaaggttatgtaacgtctagctcattccgtagaatttgcacagttattcatgtttctgcctggttatgcattatttaattgtttatgatgtgttggagtcgggtggttcgggtacggagtggttgtagtgaggattgagacacttagtctcttatattggcctaacagttgaaaaagtcaactaggagttgacttatgggtaaacgacctcgaaggtagattttatggctcagatagcttcgttaggtgatttggtacttgggagtgtgttcggaatgtagttttgatgttcggtatagaattaggcttgaattagcgaaagttagtttttggctatttccggtcggaatggaattccgaaagttggaacaggttcgtaatgtcattttggatatgtgtgcaaaatttcagatcaatcgaaggtgtttttgatgatttcagcatctttggtgaaatttagaaatttcaaagttcataggcttgaatttgatgtgattttggtgtttttgcgttgttttggtgtttcgagggctcgactaagtttgattgaggttatgggacttgtgtgtggttttggttggggtcctgaggggctcaagttgatttcggatgggcgtcagaaggtttggagttgaggaaatgtagttgaagttgccggtgtgagtgcttctggtgtttccgcacctgcggaaggagagccgcaggtgcgaagtcgcaggcgcgggaagggatccgcagatgcggaatattggttggctgagggattttcgcaggtgcgaggtcttttccgcacctgcgaagccgcagatgtggaaggtggagcgcgtgtgcggaggctgagattttgagggttctccgtaggtgcgcacctgggactgcaggtgcgcgtaagtggacgcaggtgcggaaccactgtacaaaaagtatataagtatgccttcgcgaatttgagccattttcttcaatatttcgtccaggtttgaagcttttgaagggattttgaagagggaaatctataattcttcattgaggtaaggtttttggacttaaaactcatttatatgtgattataggtctgattagtggtgaaaattaggggaaaatcaaagcaaaaatgggtaattaggacttgtgattaagataccttaaaatgaggatttaaggggtcctttggactctgatttcagtgttcttgatatgtatagactcgggggaggatgaggatccttgtggtataaattttatcgaattccgagacgtggttctgggggccgggtttggccaatttcgggaattgtgtctaattttgatagttttcgattgggtttcgtccccctagcatattttgatgttattaatctgattttgatagacttagagcttttgggagctgattcgagtggtaagagtattgcagagtaacttttcgggttgtttgaggtaagtaatgactttaaatcttgtcctgagggtatgaaaccccggtgtattggtaaaaaagagcttcacacgtgtaataagacttgacgactcagccagttacgtggagcaatgaaaacatgacaacttgacaggcttctataaagaggtacgggccaaagaggcatgacacaatatacctacaaggtaatcaactacgtgaaactcaacctgattgaaacaaggaagagacacggtctgaatgaatccggacagagctacgtgcagattcagatatcttcaattaatgatccacacgttacacaaccttcacgcaacagttacggttattctttgtaacgttacattaatgtaataattagtcattaatgagcgatcattgcaagaggtagacgttatattaaggaattccctatataagggaataaaatataacttgtaaagggcatccataccgcgaacttaatacactttacttttccgtgcatcttattattgtctatttacttactcattcgtaattatcactatttccttgattatcagaaacccatgttcatcataaaaatagctttggtcaaaggatctaattctttggttaaacaaattggttccattaccgggaatctgataattttggtttatttttcaagcgatatcctctgaattatgtcgaaccccaacaataataaccagcaacgaaatgggactccatcacctcctggatccccaggaggttccagagaacaatcccaagaaagatccaacaacaacaacaacaatgataatgatcgaacggtagaacaagatcaggtgaagcaaatgattgcagagtgtgtgagccaggctttgcaagaattcgcaaggggattaccagcgacatcacctacatcactgacaccacctcccaataataccatcaccgtggaaaatccccaatctgggttggtaaactcagcaagggaagatactcctaatgaatctctcgaaacaagaccatgtatgactaataactctaaactacaaaatttattactaaccttgcagaaacaggtgaaggaacaaaacgatcgaatcgagcaaattcctggattaccacctcttatcaaaggcattgacgttgatagatattctcaacaaccttggaaaccaagtgcggcacccttgcatatacccaagaaattcaaaatgcctgatgttcccaagtatgacggaacaactgactcacgcaaccacgtgactgcttttaccacctgagtgaaaggcaacgacttaacaaaacaagaaattgagtcggtcttagtcaagaaatttggagaaatacttaccaaaggagcattaacctggtattctcttctccctgaaaactctattgattcttttgccgagcttgcagattctttcataaaagcacactctggtgcgcaaaaagtcgagaaaagaatggagaacatatttaaaataaagcaaggagacacggaactactccgtgaatttatagacaagttccagcgagaaagaatgcaactaccaagggttcctgataattgggcagccatgacattttcaagcaatctaaatgacaaaagctcagaagccacgagaagactcaaggaaagcttgagagaattcccagctacaacatggaatgatgtctataacaggtataacaccaaacttcgtatagaagaagatactattgcacgttcaaaagacgacaatcgtatcagttccagacattccgagtcagacaggagatcaggtaaaaacaggtacgatccttatatgggaccctcgggatgagaaattcgtcccaggtttgaaaacactcaatcagaatatagaccatcaagcagagatgcaggatcatcctcatcaagatctagaaacaatcgagatgaacgaactagaggtaatgcacgaattggggatcacaccttcaatgtaagtacttccgaactagtttcagtactaaggaatatgtgtgataaggttcgatggctcaaagaaatgcggtcaaacccaaataaaaggaacccagatttctggtgtgagttcattaatgatcatggacacagaactgcagattgcagatttttacaaggtgaaatagaacaattattgaaacagggctacttaacagaattgtttagtgaaaagggtaaacaggcatacatgaagaacatgcaggagaccctgaaacctccatctccaaaaagaactgtcaacgtgatacatggaggtgaagaagtaaatggagtggtttgcaaagtagccacgaagttcataattacacacagaaatcgggttcgagaaaatccggccgcagacgatataacctttgatgatgcaggttccggcggactaatgcttctccacaatgatgctctggtaatatccttactcattcatgacactaatgttaaaagagtgttgattgatcaaggtagttcattcaacatcattttgctaagagtcgtggaagaaatgcttttaggaaatcaggtgatcccaaaggcacgggccatatcagggtttgacaactctacagttataaccgaagaagaaattgaacttagcaattatgttgagggagtaatcaaaaacaccatattccaagttaacgatactgacatggcttataacgtaatcatgggaagaccatggatccacgacatgaaagcggtgccatctaccttacatcaggtaattaaattcccttctgaatggggaatacaacaaattagaagtgataatcagacctctagaaatataaatcttgtggtgcactataacaaaaaagtagagacggaagaatcaaaagatagagaaatctcaaaggcaaaagttgtcgacaaaacatgtatggaagcaattattgctcaaacaggtacggaagaagatagtcacgagaaggtgaaccaagtcaccatgaaatatgcattaaaccacacagacgtagattccagaccagacgtcattcaagaatcggaggaagatgagcacatcaaaacaaccatggaagagctcgaagttgttccattggttgaacaaaaacctgaacaaaaagtgcatataggcacgaggctgagtcccgatcgaagagaagaaaagaaagcaagggtcattcaagaaccaagtgattgatgaaaagggggacttattgttacaaagtcatgccttttggcttgaaaaatgcgggagccacgtaccgaaggctagtgaccaagatgttccaggaacatatggggaagacaatggaagtttacattgatgaaatgttggtaaagtcaacacatgcggaagaccatttccagcacttgtatattacctttgaaattttacgcatgtataatatgaaattgaatccaaaataatgcatttttggcgtagaatcaggtaaatatttgggtttccttgtatcaaatagaggaataaaagtaaaccctgctcaaattaaagttatagaagaaatacctgatatacttacgaacaaaaaagaagttcaaagactaacggggagaattgcagccttatgaagatttatttccagatcttccgagaaatgttttaaattcttttcagttctcaagaatcaaaatcagttcgaatggattgaagaatgtcaataggctctcaaagacctgaaggcttatctatcaaaaaccccgttgctatcaaagccaaaggagggagagaggctatacatctaccttgttgtcgcagaaatcgtcgtaagtgcagtattggtaagggaagataaaggtaaacaatctcttatttattgtgtaagcataaaattactagatgccgaaactagatacacacatctaaaaaactagccttaactctaatcatggcatttagaaaattgaggccatattttcagtgtcatctaatcacagttgtgacctcgtatacataatgaaatatactgcataaacaagaactatcaggaagatttgctaaatgggcaatagaattaagcgggcatgacataatatatcagcctaggactacaataaagtctcaaattttagttgattttgtcgttgattttagtaatagcattgtcccagaagtggagaaagagttacaactctttaacggtgctaattcgggtctatggaccccatttaccgatggttcttccagtgtaaaaggtgtcggcttaggcatagtcttaatatcacccatgggtgaaaagacactacacaccatcaaatgttatcctataactaacaatgaagcagagtacgaagttgtcattgcagggttagaactggcatgagaactttcaatcgagcaaattgtaatcaaaagtgactcccatctggtagtaaatcagatgcaggggacttacatcgctcgggagactcggatgcaacagtatctagaaaaggcacgagatctcgtaagacaattcaaaacgtggaaggttatacaaatacctagagaagaaaatgcagaagcagacacattggttaacctcgcagcagtcacggaagtaacgaataaagacaatgcaattgtcgttcatctatttcattcagcaatcgaccaggacaaaaatgaggtaactttcaacaatttaacctgggattggagaaacaaaatttttaatttttttgcaaaatggcaccgtacctgaagacaaaaaagcatctcaagcacttcgccgaaaagccgcacggtactgcctcattcgtaattctttatatcgcaagatgttcggaggtcctctagcaaagtgcccggacctaaccaaatggagttcgtgatgagagaagtccacgaaggacactgtggaaatcacgcaggggcgagatccttggtcaaaaccctaatcagagctgggtactattggcctaagatggaataagaagctgagaacttcatatccaaatgcgataaatgccaacgattcgctaataatatgcatcgaccagcggaactattgcacccaaataatatcatcatggccgttcatgaagtggggtatggatatagtgggacctcttcccgcagctaaaggaaaggtacggttcctactcgtgctaactgactattttacgaaatgggtagaggcagaagctttcaaacagtgcgagaaaaagaagttaaaatcttcttatggagaaatataatatgccgctttggaatacctaaggagatcgtgtgtgataatggcccacaatttataggctcgcaaatcacaaaattcttagaaagttggcaaattaaacggattacttcaacgccgtatccctatcgtgatagaagcaacaataggataggagtgcacaagttcgcaactggactccccgtggctaatggtcaagctgagtcgacgaataaagccatcatcaacaacctgaagaaatggctagagaaagccaagggaaattgggccgatgagttaccagcagtactatgggcttacaaaacaacttcaaaaacagccacgagagaaactctgtttgcacttgtctatggctcagaagacttagtaccggtagatattggagaaccaagcataaggtttacaacagccacggaggatgcaaacaacgacgagttgggaattaatctagacttgctcgaacaaagatgagaagtcgcgctaatacgaatggcatctcaaaaacaagttatagagcgttattacaaccgaaaatctctcctcagatacttcaagattggggacttcgttctcaaaaaagtctttcaatcaacaaaagaagtaggtgcaggaaagttaagtccaaactgggaagggccctacaaagtccgaggcatagctggaaagggtgcctacgaattggaagctatggatggaaggatcctaccaacaagctggaatgccatccatttgaagaagtattacttctaagaaaaaggaataccccccgtcaggtatcgcacgttcgattttatttttgtacagttaaaattttactaacagttttagatgataggcaaaaagctaacccatcactagatgatgacattaaacctgcaaagacacgagaaagtaactgaattcccggtctagggttacactttccgatggacgttttaaagggttaagcaatcatcatataaaacctatataccttcgagtccagtatgtttttccttttcaggaaaacgaccacaaggaaggaatagtcaagtgctcgagattttattcttcaaagatcaaacacttgggggactatacagtatggaaggcaaagacgaagcgaagaagactatcaaaaagtcaaagctcgagcctgaagatccttctatccaacaagtcaagtgatacgagcaaaatcgaaagagccaaagactcaaaacacaaagcctgatccaaaaaccttcgaacaatgttcaggttaaaaggtaaaatattagctacgaggaaggaatgcacatctttgtacttattcaaaaagaaaaattgttgtaactaaaaacagttatgaaatctttgtactcatatagaaaactgttatcaaataaaatagttacggatgaaagatcaaaatccttgtacttattcgaaaaaatattacaaataaagcagttacagataaaaaaagcatttccctcatgattattaaaaaaatttatctacaaaaacagttacaggtgaagacccatacttttataaaaactattacaaacgaaacacagttactctcttgtattaactcgaaaaaactgttacataagaaaaacagttacgaaatacaagtgtatatcaaacctgttaaaagaaagcagttgcaacatgagttttagacgataatcaaacacatgcaaaatgttgtgaaagttcaaacaaaaactttcttcagaaacattcttaaacatgtgaaaaattcctatctctctattgcattgttacaccattatgaagttgagacgttttcttcattaagtgtcgatcaaaaaagaagggccctctttcacaaaatcgtacctactacgaaaaggtgcagataatttaaagcattttatatgcaaaactcagaggtaaaactaaaacctcgaaaataaagcatgcaaaagacttaaagagtgaaacagaaactcaatggaaaacaaaagtcgtatttgcattaatatattaaaacggctaagtagaaactaagtattaacttatacttagccgtatatagagtttttacattaaggtgcccctaagttgtcagttggggaatttaagagatctaaatttacccccccctcccccaacgggattgggggtaaccaccaattgagacaaagaaaataaaggaggaaccaaacttcttaaacttcatcaggagggggtttgacttcttcactggcggagggaccaggagcagcttgggacgaggagacttgaacagtaggagactcaccttcaggtgaagagagattctgaccttgttgagccttctccatggcttccctgatttttgcaatttcagcattaaggtcgatatcctctcgactcatttcagtcaatgtgttgaaacgagagttcatgtacgcacaactaacatcgacagttttcgcgtcttcaagagcttcgtaatccttctcccatatcataacctcagctcttagccaatccttctcagccacaacaacatcatttgaggcccttaaaagcgcgatagacctttccaggaattgaattttatctaaggaattgcggagacactcctgggtacgggtaagtgactgcacaagctcgcctgaatactcctccttttggtccagtaaggccttcaaactcctaacttcttctgaggcacgagataactgctcaggaaatgaggactcaaggatgttcttatctttgcccgcttgattagaagaagccttctccattgccaactcttccgccatgactctcacatgctgctccaaggtacatttttcttcttctaaggcctccatgtcgagccttaagttttcatactgccccttccagttatcttcttcagcatgccactctttcatttcctgctccgtgttagaaaccctcttcataagctccgtgcctataagattgatctacaaaaataaaaccaattagatacggtaaatacatgtacaagaatgaaatgcaagaaaatgcactctacctttaaagaagtatgcacgatctcattagcccatgtaagggaactatggctatctagcttggctctctcagtcgggcctatcaatggtttcagccacacatcaggctggccagactttttaaagagactcccattagctggaacttctatcagcacctgcctcatctccctgctggaagaccctacttctctaacagaagacacgaaagaaggcagagatgtaggagccatgggcaaggaagcctgaggagtcgaaaaatacacgggagcaagagaagtaataggaccaagaatagccatagaagcaggagaagtaactggagcaatagaggggagttctctaaaagaaggggaaaaacaaccaagggagcttcatcacctacgggactaaagccttcacggaacaaatgatcaacagaatcatgaacgggagagggggtagcatcctcggaggcagaaagtccaacttcaggcatggaaggcgcaaccacaggtgtagattcttcgtctaatatcaccttctttttgcgcgacctatggaccaaagtgccctcctcttccttttattcttctgaggtccttgaaccaccgacctttctcctcttcctcttatccttctgaggtccttgaaccaccggcctttctctttgaagaagaagagcctgaaatgatttcctaggccggagccagggacaatttgggaacggatgcagcagacattccacgagcgtgaaaccctgtcaaaagaaaaagggtaaaacaacaaaaaagatgctcgagcaaggaaagaagcagaaataaaagcttcacttaccatgagttttcactttccaaccgtacttcccggagaagtacttccatgacctttcttccaacggagcaattgacaaaagttttctacccaatcacggataccggagaattctcgacagtacccatgatttctgcaaaaagaagaaacatctacggtgttaataaaacatctaaaacaaaaagcaaggaatgtgagataaaatgtactcacgtgcacgattccacttctcagggaagggaagatgttcttcacctactaaaccagcagtaggtacatcaacgtaccaaaggtaccaacctctatcgttatcatcgtcaggggtcaccaacactcttttactcctggcaaccagagtaaaaatcccttgacgaaacaacatcgtggaataaaggtgaataagatgattaaaggtgaagggtaccgaagctaaagtagctaaacatctgagacatgcaacaactctccatacaataggactgacttgtcctaagcaaatttcgaaaaaacgacagaactcgatgataactggatcaatgggaggtctaaaccctaaggtaaaagggtatgtataaacaaaagtataccccatcttgtatgacgttattctttggtttccatttggaactatgacagaaaaatcggacgtccaaaaatagtccctgcaaacaagaggaattaaaccttcggtgatcagggtagggtacctatcaacactatcaagagatgacgactgatctttaagggcttgattatccctagcgaaggtaaactcagcaggtatgatttcatcaactcagggttccgtaaaggttcgtgatgttatctacctctatacgaagatctggaagccctagctctcggagaagttaaagacctagaggaaggaggggaagtaatatgggaagaggaagaaccccttgaaggagtagaacttaaactcctcaacctaccacctctccggctccgcgttggagcagaagaaggagtcaaatcctcaacgtttatcactcccttaggctgatatgaagaagaaatatttacaaagacaaggaaaaaagttctttacaaataaagaaagaaagttagaagtttttcgtgaaagtaaagaaaaggggtatttatactcgaagacaaccgtcaagatgggaaaaaacaatgatgtgaagttcataattgaaggtgtcacttcgtgattgatgcagccgcaaaaagccctaaaaggcgccgagtaattgcagaaccaacccggaggtgacacgtggcttgagcattaaatggaagtgacaagcgacgcctacattcagagaaggatgcaatgtttcgagtgaagcggaggcaaaatattctcgcaataaatgcatataaccaaatattaatcgataaattaatggtaagtgggaggactatctgtattggtaaaaaaaagcttcacgcgtgtaataagacttgataactcagccagttacgtggagcaataaaaacatgacaattggacaggcttctataaagagatacgggccaaagaggcacgacacaatatacctacagggtaatcagctacgggaaactcgacctgattgaaacaaggaagagaaacggtcagaatgaatccggacaaagctacgagcagattcagagatcttcaattaatgatccacacgttacacaaccttcacgcaacagttacgattattctttgtaacgttatattaatataataattagtcattaatgagcgatcattgtaaaaggtagatgttatattaaggaattccctatataagggaatacaatataacttgtaaagggcatccgcactgcgaacataatacactttacttttccgtgcatcttattattgtctattactcattcgtgattatcactatttccttgattatcagaaacccgtgttcatcctaaaaatagctttggtcaaaggatctaattcttttcttaaacacccggacttagcatcttttcattattttggagtgacgcacacactaaatgacgagtgtgtggcgtgcactaatggggaatttgaatttggttcttcccgaggcagctattgagttgcgtaactacttttaaatcacataataaataatatttttatgtacttgatatatttgggttgtaagccatgtttggggcctcgtgccgacctatttaaaccccttgggagctgtttttctgatattcctcactgtggaaattatgattttacactcaggcattcatgttgaactgtatttgatactcagtcttgttgatattattccatgatataaaatgctattttgggtcgagaaccccatttattgatggaccgagtggcattttgagcgtttctgactgagtgaggcctaggaccaatattgtgaggatattatggatcgggctgcacgccgcaacatgttacactgttatgatatgtgagaggccgagtgccagagtgattgatgccatgatttggcttgttatagcgcttgggctgtaggagcctctccagagtctgtacaccccagtgagcgcaagtacctactgagtgcgagtgccaagtgacgagtaattgggaggcatgagtgactgtgaggttgcccgatgggctgatgctgagtgactgtgagatatgctgagtgaatgattttgagtgatgattttcccgaggggcggtttatgaaacttgttttgctggaataaccatttatgattcatttcatcttaaaactaatacttcttggctattttactggaatcactggaaatcacatatgttcaaaggatttttactgaagctggcttttaaagcacattggctaattgtatacactgttggaaatcaatatttttactgaatatgatttgatgttttgctcctatgtgtttcttactgttcatacctaatttattttcattactactgagttggggtactcaccattactccctgcacctctgtattcatgtgttggtatcgagcattagacatcttatcctgtgcggagctagagttgggatattaaggtagctttccaatgtccacaacatctctatttccctttattattttttacttagttcatcgttccgagattttgaattatgatagtagtatttctagtagcattcttagatgctcatgacattttggctccagattttggggatggttgtagactgtttagctgtttgttttgctataaattcagaaatttatatacgtattgtgaaatgttgaaaataagttggaaattatgaaaagaaactgtaaatatacgattgttggctagcctagttccacgataagccatcacgaccggttaggatttggggtcgtgacaagttggtatcagagcattaggttacataggactcgacaatcatgagcatgtttagtagagtcttgcggatcggtacggagacgtctgtacttatcttcatgaggctacaaaactcttaggaaacatctcattttcttgaattatgttgtgcccttctattgattctggaagtttaaacttctgttgtttcattctctcacagatggtgaggacacacgctactgatcagggtgaccatacaccagctagaccagcgacaggtcgaggccacagtcgaggccgtggtaaaggtagggtaccagcccgcgcaacagccgaggcagtaccagtggatccccatactattcaggatcaggttcttgccatggggattctagcgggacaggctcagtcaccggcaatgcccattgttattctgggtcttcaggagatcctggctcagatcttgacagtatgtactaaccttgctcaggcagttgctttatctactactgccgctacatctcaggccgggggaggcactcagactccagcttcccggacacctgagcaggtggtacaaggccttcagacaccgggggcagttccagcccagtcggttgttccagttcagaacttcgtggttccagctatgccagaggatgagcagcacaagctggagaggtttagtgtacttcagcctccgacattcagcggcgcagagggcaaggatgcctagggttttctggataagtgtcaaaggatacttcgtactgctgggattctagagattagtggggtctcatttgctacttttcagttttctgggtctgctttcacttggtgggagtcttatgagaggcgtaggactgttggttcatcacccttcacctggcagcagttctccactatcttcttggagaagtatgttccctagtctcaccgcgagaagcaacgtaggcaatttgagcagttgcgtcaggtagagcaatcagtgacacagtatgagatgcgattttctgagttagctcatcatgctactgagttagtccctactgatagagagaggattaggaggttcgtggatggactcatgtaccagctccatattctgatgactagagagagattatcaggtgctaccttcgagcaggttgttgatattgctcgagatattgagtctgttcgctgtcaggagcgagaggagagggaggccaagaggcctcgtggatctggcatttttaatggtaatccttaccgagagaaattttagcagagcagaggccacccatataggcctccacagccagctcgcgcaacttatggtggtttatcatcggggcagggtcctcgcagctgtcatccaagtcggtcttcatttagtgcccttccagctcagagttcctccatagcatcatcattccagggttcttctatgcatggttcatccaacagctatcctggtgccaggggttcccttcagtccccatctccagctccagggagttgctttgagtgtggagagtttggacatgtatggaggcagtgtcctctccgtcctagtagttcttcccaggagaggggccagccctcgacttcaactccagtcacttcaccacctgcccaggcagctaggggtgggggttaggcaattaggagataccctagaggagaggtcgagcatgttaaggtcaggcccgtatctattcacttccatccaggccagatgctatggcctccgacgtagtgatcacaggtattatctcagtctgtcaccgagatgctttagccctattttaccctggttctacatattcatatgtctcgtcttattttgcacatttcttggatatgccccgtgagtctttagttacgtctattcatgtgtagactcccatgggtgatactattgttgtagaccgtgtgtatcggtcgtgtgtgatatctattgggggtctaaagactcatgtggacctactgttactcagcatggttgagtttgatgtgatactaggcatggatttgctatcttcatgtcatgttattcttgattgtcacgctaagaccgtgaacttggttatgcgtggagttctgagggttgagtggagaggttcctctgagtatgttcctagcagggtgatttcttacctgaagtctcaatgtatggttgagaagggatgtttatcttatctggcttttgtgagggatgttagtggtgagactcttgctgttgattctgttcatgtggttcatgattttcaggatgtgttccatgtagacctgccaggcatgccacctaacagggatataaactttgctattgacctggtgccaggcactcaacctatttctactccaccttatcgtatggaaccaacggagttgaaggaattgaaagaacaacttcaggaactcctagataaggggttcattcggcctagtgtgtcaccttggggtgcaccggtgttgttgtgaagaagaaagatggttctatgtgcatgtgtattgactatcggcagctgaacaaggttacagtgaagaaccggtatcctttacctcgtattgatgatctgtttgactagcttcagggatacaaagtgttctctaagattgacttgagatctgggtatcatcagttgaagattcgggactctaacatcccgaagactgatttcaggaccatatatggtcattatgagtttcttgttatgtcattgggctgaccaatgccccagccgtgttcatgcatttgatgaacaacgtgtttcaaccgtatctggattcctttgtcatagtgttcattgatgacatcctgatatattatcgtagccaagaggagcatgctcagcatttaagggttgtgttgcataggttagagaggagaaactttatgcaaagttctccaagtgtgagttttggcttggctcagtagctttcttggggcacgtggtgtccagtgagggtattcaggttgatccgaagaagatagaggtagtgcagagttggcccaaaccgtccttagctacagagattaggagtttccttggtttggcgggatattaccatcgctttgtggaggggttttcttctattgcttcacccttgaccagattgacctagaagggtgctccattcagctggtcggacgagtgtgaggagagctttcagaagctcaagacttctttgacctcagctccagtgttagtatttccatcatcttcaggttcttataccgtgtattatgatgcctcgaggataggcattggttgtgttttgatgtatgagggtaaggtgattgcctatgcctcgcaccaattgaagactcatgagaagaattatcttgtgcatgatctcgagctagcacccattgttcacgccttgaagatttggcgtcattatatgtatggggtacattgtgaggttttcactgatcaccgtagtttgcagtatttgctgaagcagaaggacttgaatttgcgctagaggagatggttggagattctcaaggattatgatctcactattctatatcatccatggaaggccaatgtagtggctgatgcactgagtcgcagatcagagagtttggggagtctagcctaccttccaacagcagagcgacctttagcacttgatgttcaggatttagcgattcggttggtgagattggatttgtcaaagcccccgcgggtattggcttgcatagcctccaggtcttctctttatgatcagattagagcatgccagtatgatgaccgacacttgctagtccttcaggacagggtccgtcgaggtgatgccagggatgtgactattagtgatgatggggtcatgaggatgtagggacggatttgttttccctatgtggatggcctttgagagttgattttagcaaaggctcatatctcgcggtattccatccatctgggtgtcgcgaagatgtaccaggatttgagacaacattattggtggaggcggatgaagaatgatattgttgagtttgtagctcggtgtcttaactgccagcatgtcaagtatgagcaccagaggccaggtggattgcttcagaggttagatattcctgagtggaaatgggagcggatcaccatggactttgtagttgggatcccacggacttcgaggagatttgatgctatatgggtcattgtggatcggctgaccaagtccgcgcaattcattcctgttggtactacttattcttcgaagcggttagttgagatttacataagggagattgttcgattgcatggggttccagtttctatcattttcgatagaggtactcagttcacatctcagttttggagagtcgtgcagagagagttaggtactcaggttgagttgagcataatgtttcatcctcagaccgacgggcagtccgagcgcactattcagattttggaggacatgttgtgtgcatgtgtcattgattttgggggttcatgggaccagtttctaccactcgcagagttcgattataataatagttaccagtccagtattcagatggctccatatgaggctttatatggtaggaggtgtagatctccggttggttggtttgagccaggcgaggtcaggctattgggcacagatttggttcaggatgcgttggataaggtgaagttgactcaggagcgacttcacacaacgaagtctaggcaaaaaagttatgcggaccggaaggtccgggatgtgtgtttcatggaggaagagaaggtactgctaaaggtatcaccgatgaagggtgttatgaggttcggaaagaggggaaagttgagtcctagttcattaggacttttgaggtgctttagaagattggggaggtgcttcagaagattgggtcggtcgttccgtagaatttgcacagttattcctgttctgactggctatgcattgtttaattttttatgatgtgttggagttgggtggttcaggttcggagtggttgtagtgaggattgagacacttagtttcttatattcgcctaatagttgaaaacgtcaactaggacttgacttattggtaaacaacctcggaagtagattttatggctcgaatagcttcattaggtgatttgggacttgggagtgtgttcgtaatgtagtttagatatccggtgtagagttaggcttgaattggcgaaagttagtttttggcgatatccggtcagcagtgaaaaataggctatcggggtcggaatggaattccgcaagttggaacaggttcgaaatgtcattttggatatgtgtgcaaaatttcagatcaatcggaggtgttttggatgatttcgtcatctttggtgaattttagaaatttcaaagttcataggcttgaatttgatgtgattttggtgtttttgtgttgttttggtgtttcaagggcttgactaagtttgattgaggttatgggacttgtgtgtggttttggttggggttccgaggggctcaggttgatttcggatgggcgtcggaaggtttggagttgaggaaatgtagtcgaagctgctggagtgagtgcttctggtgtttccgcacctgcggaaggagagccgcaggtgcgaagtcgcaggcgcgggaagggatcctcataagcggaagtttggttggctgagggatttccgcaggtgcgaggtcttttccgcacctgcgaagccgcaggtgcgcgtaagtggccacaggtgcggaaccactgtacaaaaagtatataagcatgccttcgcgaatttgagccatattcttcaatatttcatccgcgtttgaagcttttgaagggttttggaagaggaaaatcgatagttcttcattgaggtaagttttttggacttaaaactcgtttatatgtgattaaagatcttattagtggtgaaaatttgggggaagtcactgcaaaaatgggtaattagggcttgtgattaagagaccttaaaatggagatttgaggggtcatttggactccgatttcagtgttcttgatatgtatagactcgggggaggatgaggatccttgtggtataaattttatcgaatttcgagacgtgggaccaagggccgattttggtcaatttcgggaattgtgcctaattttgatagttttcgattgggtttcgtccccctagcatattttgatattattaatctgattttgatagactcgtaacttttggtagccgattcgaggggcaagagtattgcggagtagcttttcaggctgtttgaggtaagtaatgactttaaatcttgtcctgagggtatgaaaccctggacttaccatcttttcactgttttggagtgactcgcacactgaatgacgagtgtgtggcatgcactaatggggaatttgaatttggttcttcccgaagcaactattgagttgcgtaactgcttttaaatcacataataaatcatatttttatgttcttgatatatttaggttgtaagccatgtttgggacctcgtaccgacctgtttaaaccccttgggggctgtttttctgatattcctcaccgtggaaattatgatttttacactcaggcattcatgttgaactgtttttgatacttagtcttgttgatattatttcatgatataaaatattattttgggccgagaaccccgtttattgatggaccgagtggcattttgagagtttctgactgagtgaggcctagggccaatattgtgaggatattatgtatcgagctgcacgccacaacatgttacactattatgatatgtgagaggccgagtgccatagtgattgatgccatgattttgcttgttatagcgcttgggatgtatgagccactccgaagtctgtacacccccagtgagcgcaggtacctactcagtgcgagtgcctagtgacgagtgacgagtgattgggaggcatgagtgactgtgaggttgcccgaggggctgatgctcagtgactatgagatatgctgagggaatgattttgagtgatgatttgcccgaggggcgatttatgaaacttgttttgctagaataaccatttataattcatttcatctttaaactaatacttctttggtattttactggaatcactggaaatcacatatgttcaaagtatttttactgaagttggcttctaaagcacattggctaattgtatacactgttggaaatcaatatttttactgattgtgatttgttgttttgctcctatgtgttttttactgttcatacatgatttatttttattactactgagttggcgtactcaccattactccctgcacctctgtgtgcagattcatgtgctggtaccgagcattagacatcttatcccgtgcggagccagagttgggacattaaggtagttgtccagcgtccacaacatctctatttccctttcttattttgtacttagttcatcgttccgagattttgaattatgacagtagtattcctggtagcattcttagatgctcatgacatgttggctccagattttggggatggttgtagactgtttagctgtttgttttgctataaatctagaaatttatatacgttttgtgaaatgttgaaaataagttggaaactatgaaaagaaactgtaaatatacgattgttggctagcctagttccacgataggcgccatcacggccggttaggatttgggatcgtgacatatagcaagaatgcaaatcacatggatttaatcataaatacaccaatagtaatttatttgaatttggtctagttttttgcgatcgtgaatttcacgatctccgaatgacctgaaattcggtaggatcatcgaaaacggtaagttaagaagaactcactgctatgcaatgaatcacatcatattttgatgattcaggatcgtttagatgagtgttttggaggtttggcggattaaaatatgatttacatatgagaagtcattctttctatcattttatttatgtctaatctggaacatgataacacatgttgatttgacatgaattggtatatgatcagaatgtaagtcatattttaaattcttaaaacatgcttaaaatggtcattttccaaatttggttgcaatttttggagattgtgattttaacgatctccgattgatctgaaattttgtaagtttatcacaaacaacgcagtgaacaatactcactgctatgcagttaaagacattaattttagcgttttaagaatatttaaatgggattttgagcattttattaattatggaacttaatcctcagagaaaaatgcgtggttgtgataaagtggtgatagaaatatatttctatggtctttcactattaatttcaagtgagtaacaaattacgcgttgacttttggtctttctccatatcggataaatttattgtaagctcactaggtgaaatactagtaattgatatcgtgtacttactctccatctgagtatacatgttggatcaatggaactagagctattaattatgatgttcacttgacttaaattaacagtatactcttcatataagttgggtcggttttaattattttagtgaataacctggcattacatatgtatgttgcatgagtagttcttttcacatcgaaattttctattcaagatgcatgaatacatatatatgtagtgtgttgaaattttagtattaaatggttatatacaattgtctgaaaataataataagctctccatccgagctggttctatttctttctggattgtataattcttgcattatatagtattctttgcatggatgattcttttcccatcgaaatttattattcgagatgcatgtatgtatataaatattgaatgcagtctgaattttatcattcagtgttttgacttattatgatctatttgatattttatctcagctccactatgacattatgcgatttgtcgaattacttttcaaaattttcttttgatagtgataagacattaatttaaaggatgcgatatttgtaccttttgtgttagaaggaatttaattccggtttctgggtaaaataagagatggatatttattttaagtttcgaataactcttgagttattgagcttgataaatattttatctcttggggtacatgaatgcatgaccttattattttatattaatatctctccccaaaagaacaatattattctatctcataagagaatatgttctacataattgagtaaaatttatctgtgcagctttatctaaatcatattaatccggatagaatttcaagttggtcaaggatggaccttaaggttcattgaaagtagaggcactgccaacttgtggatcctgtttggaaggaaacttgactaaaggttgtttcccttcaaaagaaaataaaactagtgataagttagaatgaatcccttttgatttgtatggttaaatgaacatacttgtaagagatagttttgagtattttgtgactttcataaatgattactcaaaatattaatatatttatttggttcaccgtaagtcttaatgaattaagtaattcaaggttcttaagacttgaaacggagaagcaccaaggaaatatattaagttactgcaatttgattgtaatggcgcgtacctctctaaagagttattttgttacttatcagaataagggattacatctcaattgactacaccataaactccataatagagcggtgtagtagaaagaagaaataagtctcttttggacatggatagattaatgaagtgctattcagatttgccttatttatttttggaatatttcctagaaactgcaaattacattctgaatttagtttcttctaagttagaacatgtgacatttatagaaccgtggactaaatgtaagttcaacctgtagcatgttcagatataggattctctagcacatatgttgaaagggaaagcagatatgtaagttggaactaagaatggataggtgcatgtttattgaatatccaagaaaacgaatggagttttattttattgtcctaaagaaaataaggcaattgttaaaacaaatgcatttttctagataaggactatttaataaaccatgttcctagaagtaaactatttttacaggaacgaggcaaagaaataactagatgttcaagaacatcaaaacccacacgtaggaattgatgttacattgcatttaagtagtgggagaacgttaatagaaagaatatgcctctgtcgggtgggagtgatgattgaaaagaaaataatatagtaagaagtagttaatatttcaataccccaaggtaatgaaggtaatattagtactacttcgtcgtagtgggagaatactaagaaaaatcatagttcggtaaacactcttgggatagtttcggtaacaggatccctgcagaatttaataccaaactagatagttacgacaaagcactactagacaaagattgcatcagaaataacttggcaagattctttaacaaaatcttattttgtggagacttttaatagtcatgtaaaaagaatgactaagaaagttttagatgcatgattaaaagtctaagtgggagattattggagaatatactattaaccatgagtttagatatagtatattctaataattgtcttggttaaaagtctaagtgggagattgttgagatatatactattaaccatgggtttggtttggatataatttattatggaacaattatttattcaattttaataaaattttaaatagatcatctattagtctttgtcttttgcttatatagtagatgatatagtgtatagagtttagcttatacacgaaagattaactcatcggttcttataagtataaagtttgagttcacaatctaatgatggaattggacaaatcatcgtggatgattgtagcacaagattaaatataagttatcttgattatgggaatggtttaattccaacttcttgtgctagtacattttgtatgtattgaacggaccaagtagagataagtattttatactgacttaataaaataaactctcatgacattaaatgtacttatactcttaatcttgatataattattattagttgtatatattattattgtattgatttattaaaaggcgagattcttttgtgggtcaatatgcctggtaaattgaataataataataataataatgtacattggcgaagtaacagttagttgatggaatccatgtctcggttcagagattaatgatacacctttatgaaagcttataagttttcatgtgtaaacccgggcagtggattttgtatccgacacatgaaatgagttaagcgaaattctaaatgaaataatcaataaattaaatcatcggtaattgtgatgacccaaaaggtcatcccgtgtaattttaacttaatctgtgttccgaggctctgaaagcctttatttatcttacctcgatgtacgtgcatagcccgggcccgtatccaggaagcctttatgtgaaaaattaaataaatgttgaatttataataattaattgaataaagttgactttggtcaacatttttggtaaacgaactcagacccgtgatttgacggtcccgtagggttcgtaaaaaaatatgggacttgggcgtatgcccggaatcgaaatccgaggtcccaactccgagaaatgaatttttaaagaaaattgttttctgaaaaatataaagacttttgaaaatgaactttgatgtgaaacccgtgttaccagacccgtattatggttaaggagcccggagtaggttcaatatggtttttatgtgttgtctgtgaaatttggtaagaaacggacttggtttgacgtgattcggacaaaaaaaatggaaaatttgaagttttgaaaaaattctatagattttggagcttaattcattattttttatgttattttggtggtttaattactcgaataagtccgtaggaggattttgaagtcgtgtgtacatttggtattgggccccgagggctcgggtgagtatcgggtaggtgtcgaggtgtaaaggtattggaaaattctggtgtaaataggttgttgctggtgtctgatgttttactctgtgcgatcgcatatatccctccgcgatcgcatagctttgtgctggcaaggggaaatttgatacactgtgcgatcgcatagcaggccccgcgatcgcatagtgtaataagcagggggctaggtagatacttgtgcgaccgcatacccttaatcgcgatcgcatagggtagggttcttaaacctgtgcgatcgcacccagcaatccgcgatcgcagtgcttcagaagtcactcctctatgcgatcgaaactcctcctccgggatcgcatagaccaattttgcccagttattttaaagacccaaaaatcagaatatacattacgggattttgcaaaacttcacaaccctcttcttctccaaaacccattgacgattttcaagctattcttccactataacctattaggtaagtgattttgacattgttttctttcatttttcatcaatattcattagattctaggcctaaaaacatgaaatcaaaggtagaaattggggttttgggtagagttagggctttttgaacttttttggaaattcaacctcgttttggggtcggatttcgaaacaaattatatattcgagttcgtgggggaatgtgtgatcgggttttggtccgaacctcatgtttggaccaagcgggcccagggtcgaattttggattttttagaagaatgttgggaattctataattaggctttggaattgaattattgagtaattattgatgttattgagtcgattatgtctagatacgatcgtttcaaagtcgagttcgagaggaaaaacggtgttaaaggcttgattggcattctcgcagccgaggtaagtgtttggcctaactttagcttgagggaataggtgttgagtcgtacgtgctacttgtttctatcatgttcaatgtataggtgaggtgatgagtacctatacattgtttgtcaagcatggccgtgagtcggttttggtgtattacatgttattgcttcgatattcattgttttatgaagtagattcattttggaagttgttcatttgctgagaatacttgattaaggatttgtgataagttgtttcagttgaggattgatttgttaagttatatactcgtatgagattggttatagctgagtcccttgtcgggcagtattgttttggttgttatccccttgctgggtggttatgaattgtacttcctactgttgatttccttgccaagttgttgtttgatgttgattgggtgaggaagagtgtaaagtacgaagggtgattccatgtattcatttcattcattgcattgtgaggacgagagtaaaagcacgaagggtgatgtcatgccatgatttttcatttaaaagcacgaaggaacatgccgtgcccttttatttatttattacattgtgagggcgagagtaaaagcacgacgggtgatgccgtgtacttattttggtaaggatgagagtaaagcacgaagggtgatgccgtgtacatatttgtttatgttgttacttcttgttgacctttactcttctatattgtggccttgcacagttattcattattgttctatttgtttcccccattatttgtcccctgcctacccgtacttaaatgttaatttccttttatttccctgttatatatattagaactgcacaggtgatttgttgttatcgtgtctagcctcatcactacttcgtcgaggttaggctcgacacttactcagtacatgaggttggttgtactgatgctacacctgcacttctttatgttgtgcagattacgcagccggacctagtggacactgacagagggagtatccttcagtccacgcaggcgacattgatgtagtcccgcagacgttcaggggtcttggcgtcaccatctatcttctcattttctgtcttatgttgtagttccaagacagttgtacttacttatttcagaccattgtatttagtaaactcatagactgttcgtgaggttgtgaaaccggtttctggggttgttcttacagaaatttgtatgggatgtctattctagttcttgaatttcatattacttctccattgttattataaatgttctagttagttttggttatttaatagttaataagtcaatttaatcaaaacgttggcttgtatagctggttcaacgttagacgccatcacggcctgaaggtgggatttcaggtcgtgacaagttggtatcagagcactaggttgcttaggtctcacaactcaggaaaaaacttggtagagtctgagggaatggtacggagacgtctgtacttatcccctcagaggcttcagagttaggaataacttcactttttctccttctctgtcgtgcgattttaattctaaatgctaattgagtttctattctattctctcgcagatggcgagaacacatgcttcctcatctaccgatcatcagcctgatcctcctgttacagttcctacgaggggccgaggccgtgctagaggctgaggcaggggcagggctcagcccagagcagcaacccgagtagaggacccacaggtagactttaccggtgaggttcctactcagacggttccagtcggaccagctcaggtcccagaggggttcgttgccaccccggttcttcaggacgctcttgtccgcttagtgggacttatggagagcgtggcttaggtcggtattctttctactgcaccatccgtctctcaggctgggggagggccccagactcttgctactcgcaccctagagcagctagctcctcagttccagattctggcacctcagacagttggagtagctcagtcgggtatcttagcaccggcagttgagggagcagctatgtcagcagatgctctatggagactagatcggttcaccaagctatttcctactacttttaatggtgcaccatcagaggatccccaggattacttggacaattgctatgaggtccttcggaacatgggcattgtggagaccaatggggtcgattttgctacatttcgtctttctggtaccgccaagacttgttagagagactattgcttgaccagaccagctaggtctgcacctttgacttgggctcagttctccgagttgttcttggggaagtttcttccagttactcagatggaggactatcgtaggcaatttgagcgcctctagcagggatctatggctgttacacagtacgagaccaggttcattactctggctcgacatgctatcatgataccccccactgatcgagagagaaagaggaggtttatcgagggtttggctcagcccattagacttcagatggtcagagagtcaggtactgatatttcatttcaggatatggccaatgtggccaggaggattgagatggttttgtcacaaggcagtggtcaggggtctgacaagagacctcatcatttcgatcatttcagtggtgcctcatctggaggcagggattcttttggcagaggtcatcatcctagaccataccagtcgacactttaggtatcccgcagtacaccaccagctcctatcagtgcaccgccgcttcaaagctttcaaggtggttattcgggtcgacagggtcagttccagagtcaacagcctcagcaacagaggtcttgttattcttgtggtgttttagggcacattgccaggtattgcccccgagcttctggtacttctcagtatcagggttcctgtgccatgattcccgcaccaagtgtacccccactccctcagccatctaggggtggaggtcgaggtgtcataggtggagctcagactcatagaggtggaggacaggacccgagaggtagaggtcaggtcgcaataggtcgacccagagatgttcaggttggaggggctccgccccggtgctattttattcctgccaggcctaaggctgaggcttatgatgcagttattacaggtatggtttcagtttgcagcagagatgctttggtcttattcgattcgggttctacattctcctatgtgtattcatattttgccccttttctgagtatgccccgtgattccctgagtacttctgtatatgtgtccataccggtaggtgattctattgtggtagatcgagtctacctttcatgcttagtggttattgggggtttggagactcgggtagatcttttgcttcttgatatggttgactttgatgttatattggggatggactggccatctccctaccatgctattatggactgtcatgccaagactgtgactttggccttaccgggagtacctcatttggagtggagagggactcctagtcattcttccggtagagttatttcatacatgaaggctcggcgcatggtcgagaagggttgtttggcctatttggcctatgttcatgattctagtatcgaggttccttctatggagtctgtgcccgtggttcgtgagttcccagaggtattccatgctgacctgccgggtataccacccgacagggatatttatttttgcattgagttggctccgggcactcatcccatttctactctgttgtatcgtatggctccgctagagttgaaggaattaaaggagcagttgcaggatttgttggataaaggcttcattaggcctagtgtttctcttttaggtgccccaatattgtttgtcaagaagaaagatggctcaatgaggatgtgtattgactaccggcatttgaataaggctacttttaagaataactatcctttgccgaggattgatgatctatttgaccagcttcagggtgctacagtattttccaagatagacttgagatctggttaccatcagctgaggattagggcgtctgatgtccctaagacagcctttcgcactcgttatgggaattatgagttcgtggtgatgtcatttgggttgacaaatgcccctgttgcttttatggagttgatgaaccgagtgttcatgccctatttggactcgttcgttattgttttcattgatgatatattaatatactcccgtagcagagaggagcacgagcaacaccttagagtcgtcctccagaatctgagggatagtcagttgtatgccaaattttccaagtgtgagttctggttgagttcggttgcatttttaggccatgtggtgtcatcagagggtatttaggtggatcccaagaagatttcagcagtcagagattgtcctaggcccccttcagctacagagattcagattttcttgggcttagcaggttactattgccgctttgtggagggcttttcatctatcgcagccccgatgaccaggttgacccagaagagtggctagttcaagttgtctgatgggtgtgaggcgagctttcagaagctcaagacagccttgaccacgacatcaatattagttttgcctacaggttcagggccttataccgtgtattgtgatgcttcacgagttggacttggtgcagtgttgatgcagaagggcaaggttatagattatgcttcacgttagttgaaggttcataagaagaactatccagtccatgatttggagttagcagtcattgttcatgcgttgaagatttggaggcattatctgtatggggtgccatgtgaggtgttcacggatcataagagtttgcagtactgttcaaacaaaaagggttgaatatgaggcagaggagatggttagagctgctgaaggattatgatattaccattctttatcatccgggaaaggccaatgtggtggctgatgctttgagccggaagtcagctagtatgggtagtcttgcttatctatcaatcagagagtgactggttgctttggatgttcaggctttggccaaccgatttatgagattggaggtttctgagactggtagttttttggcccatattgtggcccgttcttcattgtatgatcgtattcggtacaagcagtatgatgatcgtcatttatgtgttctcatagatacgctccggcacggaggtgccaagtaggtcacagttgatgatgagggagttctgaggatgcatggtcgtatttgcgtacctgatgttgatggtattcgtgagttgatattgcaggaggcccatagttcccggtattccattcatccgggcgctgcaaatatgtaccaggacttacggtagcattattggtggtggaggatgaagaaggacattgtagcctatgtagctcagtgcttgaactgtcagcaggttaagtacgagcactagagacccggtggtttgatgcagcagattgagcttcccgagtggaagtgggagcatatcaccatggattttgtagttggactcccacggactcagaggatatttgatgtggtgtgggtcattgtggataggctgaccaagtcagcgcacttcattcttgtatcagtttcgtattcttcagagaagttggcaaagatctatatgagggagattgttcgattgtatggtgtgcccgtatccattatttcagaccgaggtactcagtttacctcccatttttggagagtatttttgtgtgagttgggcacacgggttgatttgagcacagcgtttcatcctcagacggacggacagtccgagcgcactattcagatcttggaggatatgctacgagcgtgagtcattgactttggtggttcatgggaccagttcttgcctttagccaagtttgcctacaacaacagctatcagtcgagcattcagatggctctgtatgaggcgttgtatggtaggcggtgcctgtcgctagtcggatggtttgagccgggagaggccagattgttgggttctgagtaggtccaggatgccttggacaaggtgaagatcattcaggatagactttgtacggctcagtccagatagaagagttatgcggatcgcagagttcgagatttggaatttatgataggagatcgcgtatatcttcgggtgtcgccccatgaagggcgggatgaggttcggaaagaagggcaagttgagccctaggtacattagtccatttgagattttggataaggtgggagaggtggcctacagacttgctttgccaccgagtttatcagcggtacacccggtgttttatgtatctatgcttcggagggatattgcggatccatctcatgtacttgacttcagcggtgtctagttggacaaggatttgtcttatgaggaggagccggtagccatattagctcggcaaattcgttagttgagatcgaagagttatccatcggttcgtgttcagtggagaggtcagcttgttgaggcagctacctgggagtccgagtccgatatgcggagctgatatccccatcttttccccgatccaggtacctttctatgtccgttcgaggacgaacgtttactttagaggtggagattgtgatgacccaaaaagtcatcccgtgtaattttaacttaattctgtgttatgaggccctgaaagcctctatttatattacctcgatgtacgtgcgcagtccgtagccaggaagtctttatgtgaaaacttgaaaaaatgttgattttataataattaattgaataaagttgactttggtcaacgtttttggtaaacggacctggacccgtgatttgacaatcccggagggtccatagaaaaatatgggacttgggcgtatgcccggaatcgaattccgaggtcccaactccgagaaatgaatttttaaagaaaattgttttctgaaaaatataaagacttttgaaaataaactttgatgtgaaacccgtgttaccgggccgtattatggttccggagcccggaacaggttcaatatggtttttatgtgttgtctgtgaaatttggtaagaaacggacttggtttgacgtgattcggacaaaaaatggaaaatttgaagtttatgaagttttgagaaaattctatagattttggagtttaattcattgtttttgatgttattttggtggtttaattactcgaataagtctgtagggggattttgaagtcatgtgtatatttggttttgggccccgagggctcgggtgagtttcaggtaggtgtcgaggtgtaaaggtaatggcaaaatctggtgtaaataggttgttgctggtgtctgatgttttactctgcgcgatcgcatatatccctccgcgatcgcatatatccctcagcgatcgcatagctttgtgctggcaaggggaaatttgatacactgtgcgatcgcatagcaggccttgcgatcgcatagtgtaataggtaggggggctgggtagatacatgtgcgaccgcatacccttaatcgcgatcgcatagggtagggttcttaaacctgtgcgatcgcacccaacaatccacgatcgtagtgcttcataagtcactcctctatgcgatcgcaactcctcctccgcgatcgcatagaccaatttcgcccagttattttaaagacccaaaaatcagaatattcattacgggattttgcaaaacttcacaaccctcttcttctccaaaacccatagacgattttcaagttattcttccaccataacctcttaggtaagtgattctaacattgttttcttccatttttcatcaatattcattagcttttaagcctaaaacatgaaatcaaaggtagaaattggggttttgggtagagttagagctttttgaacttttttgggaattcaacctcgttttggggtcggatttcgaaacaaattgtatattcgggttcgtgggggaatgggtgatcgggttttggtccgaacctcgtgtttggaccaagcgggtctggggtcgaattttggaatttttggaagaatgttgggaattctataattaggctttggaattgaattattgagtaattattgatgttattgagtcgattatgtctagatacaatcgtttcggagtcgagttcgggagggaaaacggtgttagaggcttgattggcattctcgcagccgaggtaagtgtttggcctaactttagcttgagggaataggtgttgagtcgtacgtgctacttgtttctatcatgttcaatgtataggtgaggtgatgattacctatacattgtttgtcaagtatggccatgagtcggttttggtgtattacatgttattgcttcgatattcattgttttatgaagtagattcattttgaaagttgttcatttgctgagaatacttgattaaggatttgtgataagttgtttcagttgaggattgatttggttaagttatatactcgtatgagattggttatagaggagtcccttgccgggcggtattgttttggttgctatccccttgctgggtggttatgaattgtacgtcctacttttgatttccttgtcaagttgttgtttaatgttgattgggtgaggaagagtgtaaggcacgaagggtgatgtcgtgtattcatttcattgtgaggacgagagtaaaagcacgaagggtgattccgtgccatgatttttcatttaaaagcacgaaggaacatgtcgtgcccttttatttatttattgcattgtgaggacgagagtaaaagcacgaagggtgatgtcgtgtacttgttttggtaaggatgagagtaaagcacgaatggtgatgccttgtacatatttgtttatgttgttacttcctgttgacctttactcttctatattgtggcattgctcagttattcattattgttctctttgttcccccattatttgtcccctgccttgctgtacttaaatgttaaattcctgttatttccctgttatatatattagaactgcacaggtgatttgttgttgtcgtgtctagcctcgtcactacttcgccgaggttaggctcgtcacatactcagtacatggggtcggttgtactgatgctacacctgcacttctttatgttgtgcagattatgcagccggactcagtggacactgacagagggagtatccttcagtccacgcaagcgacatcgaggtagtcccgcagacgttcgtgggccttggcgtcaccatctatcttctcattttttgtcttatgttgtcgttccaagacagttgtacttacttatttcagaccattgtatttagtaaactcatggactgttcgtgaggttgtgaaaccggtttctggggttgttcttacggaaatttgtatgggatgtctattctagttcttgaatttcatattacttctgcattgttgttataaatgttctagttagttttggttatttaatagttaataagtcaatttaatcaaaccgttggcttgtctagcgggttcaacattagacgccatcacagcatgaaagtgggatttagggcagtgatagtaatataatttaattgattaatatctgaatcttaacatggggagttaaataatatttaatggatggatttcgaaattgaataaggagtgcaattacgaattttagtggaataatttataattagttatggtggatattaatttcgaaaattaattccataattggaagccttgttaattaaattttgtggtccctgttgtgcctaaataataggaaataaaggaatcctttttctggtggaaaagaaaatccagcaggttctggaaaagtgttttaacccttaaaaattgtgatataaatacataaggttatccacctagaaaatatagagagatggtggccgaatttcagccatattttcctagaaaatttcgcccaacgaaaattatttgggtaacacagtagaagatcgtggaacgttcggagatcgtgatcttgtggatggtagagatttcaatgagacgatgtaaaactgaaggctcacatgactaaagagctgtgttcacgcttcaagaggtaacccgtgaaatcccgtttatattagttgtctagattacatgtgattttgatactgggattacttttgctccatataataatccatcaaatttaactcgtcaaaaaaactttaaaagagaacaaaatgttaagaattgtgacaaatatttagttatgtgattataaaacttatattgtagtattccagaaatatattataatatttttatcggtatacaaatttctcattagtaattaaattagaagtttaaagttaaattatttgtaaatataaaaatttatcatctttatttggattgaatacagtcaaacctctttataacaggctcgtttgttccaaaatattttggttgctatagtgaaatgttgttatagaggacatacattataacataatataatatttgattctgagaataactcggcttttatagtaaatgtctattatataaggatactattatagaaagatttaactgtaataatgagataatgtcataaattaaaattaatggagtatttaatttctgaggagagtttctttccaaatgttctcaaatttccactatccgtaataatagaaaattatcattctcaaatagaatccaacaaaatatggaggtagatttgctcaaatatttaatgaattcaaaataagttattacaaatataagggcagaggactcattgtatgaacctaacttacaaactgcgtgaattaaataaaatataaatgtataaagaattgtggggtagaactacaaaattgatagaaagaatgagatttttcaagagtgagacaaaaagtttagacctttgttccaaagaagagattttgtccagagccatcccaaagggtagaattgcaagagtgacaaaaaataaattacaattatgaatcctataaaaaaaagtatgaaatatttagggataattaccctattgagttgacctccaaaataataaccggtatatatatatatatatatatatatatatatatatataatattatgtatattatgtatattagatttatgttggggcactcgactacaaaggtcattcaccttgttaagagtttgatggagcagtatagggagaggaagaaggacatgcatatggtgttcatcgacttagaaaagacgtacgataaagtccgaagggaggatttgtggagatatttggagactaaaggtatacatgttgcctatattaggacgattaaggacatgtatggtagagcaaagacccgatagaggatgatggaagggactcagaccattttctggtcatgatgggattgcaccaggggtcgaaacttaatctttttttgttttccctggcattggacgttctgacgcgccacattcaaggggaggtgtcgtggttctggttcatgttatttgcagatgatatagtattggtttacgagacgcgaggcagtgtgaaatcgaggttagaggtgtggaggcagatcctggagtctaaggtttcaagctgagcagaaccaagacagaatacttggattgtaagttcagtcgtgagactcagggaggggaaagggaggtgaggctggactcgcgagtcatccctaggaaaggaagttttaagtaccttgggtctattattcagggggatagggagattgatgaagatgtcacacatcgtattggggcaagatggatgaaatggaggctcgcttatggtgttttgtgtgacaataaggtgccaccaaaacttaaaggtaagttctacaaagtagttgtcatactcactatgttgcaggggcctgagtgttggcctgtcaagatcgccatgtccagaagatgaaggtagcagagatgaggattttgagatggatgtgcgggcatgccaggttagatatgattaggaataggttattcacgtcaaggtggtatgacccccataaaggacaagatccgagaagcgaggcttaggtggtttggacatgcgaggaggagcaaagatgccccggtgaggaggtgtgaaggcaagacatggcgcaacttcagctgaccgaggatatgacccttgataggaatgtgtggatgtcgaggattagggtagtagggtaggttgtctagattgttgataccggtagtattagtatgtactcttgcattttgttggtaataggtttctatgactatccgtcgttttctttcattttgatcatcttattatcatgttgtttttatgttgcttttacatggcttttgggtgttgtccctccttgtctatcttttaactaatgtggtgcttatgttttcctgagttagggtctattgaaaataatttctctatcttcagagggtaggggtaaggtctacgtacttgattgttttctttttttccctgtgtagaaaaggttttaatttttaatttaactgtaagaatccaattagtcaggtttcgaacaacactcaaatgtatatttcttgatgaatcttatccatgtcaaaatacttaaaaggcgtcaattagtaggattatctcaataacatttcagtcccgtgaaaaaatctatatccccaatttatagaatctttaattattacataatctaaactccaaaattcacatccaacaattacccattgtgtgctataccatcatatcagccaccttctatctccgcttcctccatccccaccccaccagtccatgggaaaacaaaggacaaaaatactctaattttcttgatgtagacagagagctagccggcgaaattttttcggcgtaaaagatttggtgctttcttcggcgttcgttacaggttgtgaggtgcggagggagttttccggcgtaaaagattaagtttacatgaaaatttcactgtttcttttggcctttttccatttttcgatctggttcttcagccctaataggaagtggtggggataggctgcaataatagcaaattccattagagtgccagagaaatgatattatgcgaaatcattagaaattacctcaaagaagtagagagggtgactttaaatggatgcaatatacaacaatgaggtcatgccggaaagagtgagctgccggaaatttgctccctcaacttctgggttgtggagaagaacgaagaaggctgggatgggtgaaaataaaataaaaaagaattgtagaaaacataaaaatgagtttttgacatgtagaacacctgccaccataagtgtggttttgcactttgaaagaggtattaaattcacttgaaataaaaatgatggtaaacgaatgtccgtttagtttaaactagcttttgaccataaattttcgatttgggtgaagttttatttgaatatgaaaatgtatttggacatacgtttataaaacatatttctcaactttattttgaaaaaacatatataaaattttcaaattttgggattttggctcaaaattagaaattggggtgattttgagattggcgtaatggcttcttgtccacttaaacttgtagggcttttaaaagccgatacatgaactttgaactttcccatttgaacactcgaactcatgattcccttaactaataaacacatttgactgttaacctatacgcgtgtattacacatacacaggcgtgtccatcctgtcaacaaatgactaatgatttcgtcacacatctgatgatgagtaggcattttgtaccgttaattagtcaaacttcaataaaaatatttttaagcttattttagaagcttaaacaaagaggctataagaagctccattaattaataacatatcaagtaagggcttctctaaccttaccccatttccccgtaacgggggtaatttttggggtaatgaagctccaaccctccctcatttttgccccaaaatagggatgaatagtgttccctcaaatatggggttacactattcatctccctcattactatcaccaatattttattattattttattatttaactcttttaatttatctctttacatatacctaattatatttatgtaatatctttataatattaatttacatcttaactttgacttataattttgataaattaattttcgtgcatttactatttttatgtaaaattgtaagttaattttattatagttataattgtacaaaaaatatataatcatctcaaaaaatttcatggtgcaaatatgaaatattagatgttgctaaatttgaaaaataaaaattgaaatacattaaaattggaaatacatgaaaattgaaaatacattaaattaaaatacataaaaatttaaactacgataaataacataataacttattagggaggtacgtcgtctccaggtacaccaaaatcacaatgatttcacttttatttgaattattagttaatctataatagttgcatacaaattatattatttaaaattttatggaattatttagtggaaattacaaattaatgaaaataaaatatggaatttatttaatgaaatttaaaaaataaaaataaaaataaaagataataatataatatagaagagagagaagaatataaaaaataatattctttttttgggagaaaaaataggggaatggttggagtaagttgtccccaaaatggggaaattcccattttgggaaaaaaaaatgggggtaaaggttggagatggcctaagcaacgaaatgatgaagaatctccgctcagtcattaatgttgtcgttttatcacttttactcatctccacggaatcatctccgattgtctacattatcggcagcggaatcagcggctcctccgtggcacacttcctgcggagctattaaaactctgaaatcgacacaatcataatcttcgagcggcacaatgttatcggagggcgcatagcaacggtgactatttccggcgagacattcgaaacgagtgtctccatttttcaccccaagaactaccacactttgaattacactaaatatccaaatctctctgtccgaccttctgaatctgattcctcatttggcatttaggatggacgcgagttcattttcaaaaccttcacttcccaatcaaagctccctatattccaaatccttgtgtccttcaccaattccattttgtttttctttcgctgtgacttctctttgtttcgcatgaacacctgcattgaggtactccaacttcactagcaactgtggaatatgccaacaactccttttttccttttcttattaactaaaaatttgtggaaatagaacgaaaaacaagatttcttagttaatgctatagtgaaaaactgaggcagtgaacaaaatatgcactacacaccgaaactttgttagttggtacagatttctatgcatatacaacccattttggactattgggcgttggtaagagggctttcacgctcctatgcgtcgtgttcctcacgtatcgggctgaataggaccaactgatgccacatgggcatggtcaacggtcaaacgtatttattagttaagggaatcatgagttcgagtgttcaaatgagaaattttaaagttcatgtatcagcttttaaaagccttacaagtttaagtggccaggaagtcattacgcctttggaatttgaagtttgggatttggaattttgccaaaatgtgggcaaattttatggccaaacatgagtttgccaaataaatcccaaatttattttgacaaaattcatgaccaaacggataagtgttcaaacatatatttttggacaagtttaaggagacttaatgtatattgccttaaaacaaactttaaaaatggagtttctctttatctccgtgatgatctatttttcctattttgaggggggaacttaatttcgccttaatcatcactttctcttaatgaaaatttttcgtgtaacaagtatcctcttcgtctcacaaccctccccctcccccccccccccctaaaaaaaccacacacacataaaaacgaaaaacaaatctgaaaaatatgaaatagccactaatggtttagtcaagtactaattactctttgttagtttaccattactctaaacttaagattaaacaagctgaaaagatttataaacgttactacattgtgaagagtaggggtacataaattccgaaaaccgaattctgaaccgaatcgaaccgaattaatttggtatttcggtttcggttttttcggtatttcggtacagaaatctcggtatttcggcaattcggttcggtatacggtattgagtttttgatatttcggtataccgaagtacggtattaaaagcattgattagtttgtcggctactggatttataaaccgcaattttccatctatcgtctttgtaactttcaccaaccagccgctgcaggacgaaggaatggaagcgctatcacggggtaagaaaagataaacggtgctttcaatgagataaaacttattgttttctacagtatagtcaggctcgatgttggggaaggagaattagagaggtaaaggaggagagtttttgaaaggaggaagcgaagaacgccatgttgtgcagactgcacgaaagcgaaggacatcaatataggtgatgaggcatttgccgatcctctccataggttctttcgaaacataggaccaaggaatcacagttctactgtccatgctcgccgagcttgggtacacaattgttaactgagcgaaacaaagtagattcctaacgtagataaaaatggtaaaactacattcctcaaaattcctagactaaataaaagagatactacattttaggaaagaattaaatttttctcaattcctcattcacctttccaagagaggaatcaaattggcttcctttacaatggaaagttaaaggctcagctttaagccgtgcaaatgccaaaatatatgagaataaaggtgaagatatacatagaggttagccagagggtaaatttctacgcatttggtttatgttaaatcgtatttggacataacatactgatttcaagaattaatggaggtaaacatgtgttagcacaataatcaacatggattacattagttaatggagtgggcgagatagtaaagatttggtttaaaaaccgtaccgaaccaaagtaagaaataccgaaccgtaccgaaatattttggtacggtattgggtatacacaattgataaaccgaatatcgaaccgaaattcttaaataccgaaccaaaataccgaatgcccacccctaatgaagaggacacattccagacttgagggagaggaaagaaaagagttactttattagtagcaaattaacaatggtcttatgttgtttagtacgtgtgataaggatgataatcccgagatagaatttgaaattaactttattccttgtttgatttaagatatatggtaatcccgggataacttttaccgacacttaaagttgctatagcatattgccatatagcaatgttggctgcaactagatgtagctgatttacgattacttgcaccgatttgacattcccgagttaagaggtctagataaagagctcgtttggatcataagaattttttcccttttttttcaaaaaaaataacttttttccgaaattaacatttgttcattaaatttcccattttcacttaaagatgcattttaaaaaatttcaaatattttaaaaaacttcaaaaaaattatttttcaaaatttacactcgaatcactcacaaaacttcaaaaacccaaaattatattcatgttcaaacacaacttttgtcgatgcaagtaacaaatattcgttaggctattcatcatattttaacagtgtaacccaatatctagatttgttaccaagtgaaaagacactgatttctcttgctactgaatgtagagtccattttcctgtccatttcatcatcacttctaaacaatatgtaaaacatatacatacaaacaaacaaaaaaactaagttatgggtgggaagcaaagcacatcaccaacagaagcaaagaggatacacaatcctatgccgattaaaactacagtaataacttctgctaaataactagagaaagcgctctcatcagattgaactcgttcgtctgagctggtatcttggttcagatgacaactcggataacatcttctctaactcctgcaaggtatagttcagtaacatattggtttaaaaaacaatgcaagatgtaatgctacgcttaggaacagacgtagtaaaggtgtcttttataacatgtaaatgtaccgcgttttgctaagttcggactggtatatacaccacctctgcggaattagccctagtgacaagacatctagaaaactgagtggacatatacaacaagatcccaagatctcggcaaaattgtacaggccattataagcaagacttcgtcaacaaaaaaactgatcgctgttataatgtggctgtttcagattttgcatgtcttgcaacactcttcgacacaactttacaaggaaaaaaggaggaaagtcataatgcagatcctcgaagtgaaaaaggagttagctatgtacaatttgaggatccaaacttatacattggttcggaatctgcagaatgaccgtacttgaattactaagcaacacaactcaacaatggcatccacaggaaacaggtgcttatccaaatatcttagatggcgcgaaactagataggcaaaaggaacctcgtcatcacgtaagatccgagcatagagcaactagctttgacgcaccaaacaataggacttattaatacaccagaagaaatatatacatcgacgtccactaaatgcttaatgttatcagcaccaacaaaacagccaaagcagctaacctaactgcaggtacgctctaacaaatgatacgaaaagagtatttgatttaataatactattggggtagaattttcacaaacccccatttgtccaagcattggtgaacaaaattacccggtacctgtggtgggaggtagtaggtaccccgcgcaattagtcaaggtaggcgcaagtacgctaggataccacattttttttttaaaaaaaaaaatacaaattcccataatcaactatgaaagacatgggctggaaattcttaaagcatgaaggcactagtatgactagttagttgtttaaagatttataaacacagctaatataatacttggaaagggaatatcaaacatgtataacgtcaaaagtccaatttcttagaatgctaatcctatggcaccaacactacagccacccttgatttggcaggtaccatgattcaataccccgacagctctaggcaacttgtaatagtcactagtacgactaggctgtcgggctttcttttctagtgtgtgtgtgtgtgagagagagagagaaccttgaaaaaaggcagaataatacaaacttcagtacatgaattcttatgtaaatcaggaccagggtgaagtggtcaacatgcaccataaccccaagaagactactacttttggaacataataagcaaagcagaacaccttttgccacaccaaacattctaaaatgcattgatcaaacacaatcaaagtgtcacatatttataatgcaagcaaggttttttttaagtaaccaaactatcactagaccaaatttgagcaaaagtcttcataactgacgacaacactatggctgcattgatgcaaggaaaaaacaccatggaaatatggaatagaaaccaaaagctgacacaattatgaactgacaagtgttagacgataacgtacatttagagaaagaattatggggaattctagcatatgaaaccaaaagctgacacaattatgaactaatggttgaagcctcatataaatgatgagaggatccctaccttctctttcttaagcttcatgttctcctcttccagctgtgagaccttgctcaccagctcattctgataagcctgcaccatgcaaataatagattaaaatgtcaagtacaaatgcaaactgaggttgcgggcaaaacattagtggacagcacacctgttttctggctcgggagcgtgcagctgactctctattcttgatctttctccttagtctcctatcaagagtcttatcgatgtccgtagcatccctcttccgaccagagaacggtgaatccgacagcgcatcaatcgaaggagatggtgacaagcctattggaggcacaaaattttgcactgccgtaggattatccaatgacattgtatgtcctaaagaagcatcagcaccgaaaagcccagctttcaccaagtagtcctccaaagttgtctcgccaagagttggctttctctcttgatcgttcatgccgtcgagatttatcgccgcttggccttgttgtatgtctctccacactttatcaactctattactattaagcgcctttgccagagttaagctagactgatgctgaaaagaagtcggcaggggaagtattatcaatatccacaccagcaaactgatttagatctgcattccacacactaattagtaactcatcaagattcatgcttaccggaggcttacctaaataaacaaaatggttctcaacctcgtcaactgtgatgttaaaccataatttttgcctgcccaatagtgtaaatgagattgttgcacactcccatgagattcatggtctgaatccccattcatcaaaacctccaatcttaatccctaatggaaaacctactctgtcgaaaaataatacttttggtcaaatataaagaaaatacattcttaatcatccccattaagacaaaacaaccaatcaatcaaccacgcatcaatttttaaccccttttttttataattgagaaatccccaagaatcagccggtgctcgtgcacgagacttggtagataatgaccttctccatacccttctctacttaaaataccaggcttttgaccgcggcatggttcgaactcgtgacgttcacctaagcccacgcattacttatgctcgtactacttaaccaaagcccgggaaatcaatcccttacctatctaggaaaaaaataaaaaattgactcaatccaaactagttgaattctacttgatgaatcctccataatccatatctattctgctctacttcagccccatttccccatcaagaccaaaaaggatagaatgatagatagattttacttgtatatgcaatctttactatcaaaaagcttcaactttgctggaagatctaccctttaagcttcaacaaagcttcaactttgttataacacaccgacaacagcaaacctagttaatcccataagtgggatttaaggcgggtaatgtatacgcagaccttagccctaccttcacacatgtggtttccaattcacaaggtagagatatggtttccgatagcccctcggctcgaggaaaattgaaaccagttatatgaatattaaatcctatatatccatttagctctaatgagtcccatttccccgttaagacaaaaaaaggaaagatttttaccatatttgcaaccttcactaccaaaaagctttcacttttctggaaaaatcttccataaccccaccttcacccccaccccatccccaaaaaccccaaaacacacacacacacacacaaaaaaaaaaaagaaaatactcttttcccgtccccactagttgatgggagggtactataaacgggataccttcctgaatcatacagagaataaccactgaacattcccttttgcttattccacaacaacagcaacaataaccaagcctaagtccgacacaagttgaggtcggctggctatatgaattcttcactcaccaaatttcccttttacaacgacatcaacaacaaactcaggtggggtatggggagggtaatccgtaggcagaccttaccctacctaatgccaacctaatgcaggtagcaaatttcccttttgcttataaaaataaaaatagaataaccacttaacccccaattaattacaagacacaaagcaactaaaattgcaaccactacgtcttaatctcaaactagtttaattagctttacaaatcaagaatatcaattccactccatttgaacccctccaattccaatattcaactagtttggtccacaatttaacataatagatagaaatatgcagacccattaaggaacaaaacaaactatacacaaaatttaaacaagatcagaagtaaaacgaaacaaataaaaacccagaaagctcaaagaaacttttatttatttgatgacagaataacagacacccataattgtttttttttttcaacaaaaaagggaaagaaaaaaattatcgaaaaaaaaaaggaagaaagagaaagagggtattattacctggcagaagaagaggatgaattagtgaaaaacacagggaactggttgtcgttcgtacggggaatccacgtatcagtgtattttttgttcaaatcttgaaacagatttctcctaattttttcatctataaattcgagagaaatgtctatatttgtatgatttagttgatggggccggcccatgtgaagcgagaattttaccgttttagcaaaatattcttattttttatttgagcaccgtaattttttaatatttaaagcttaaaactcttatttagcgatgaaaaataggagattaataatttattattgttaaaatcgtttggttattaaaaaactacggtgtaaagttttttatttgatggtaaattttactccaaatactgatttagtgatttattgtaaaaagctcaaaaattcattgttggaccttagaaagtgggaagataacgtgagtttttgatttttattatttgactaaattagtgattgagaattatttgatttggaagatttattttaaatttgaggtttgaaacagatttgactgtaacgacccgatcggtcgttacgagagctttagctccgtttcccccatttctgcttcattatatgtggttcagctctattatgttgtgtcggtttggttgcctcgggttcggagtgattttggaaaggaatgggacacttagtctcttaagttagttatttagttggaaaaatcaatcggaagttgacttatgggtaaacgatttcggaattgggttttatggttcagataactttgttaggtaatttgaaacttaggagcatgttcggaatataattcggaggtccgtggtacaattaggcttgaattggcgaaaatggatatttgacgatttccggtcggtagtaaaaaattagatataggggtcggaatggaatttcggaagttggaataggtttgtagtgtcattagtgacgtgtgtgcaaaatttcaaggtaattcggacgtggtttggttgatttcagcatcgttggcgaattttgggaagtttagaaatccttaggcttgaattcggggttaattcagtgttttgatgttgttttgagtgttttcgtatggggatatgtgacttattggtgtaattggttgaggtcccgagggcctcgggatggtttcgggtggttaacggaaagtttggattgagattgtgcaactaaagttgttgcttctgatgtttccgcacctgcggataggggaccgcagatgcggaatttggaagtcttaagggaagaactgcatatgttgtagctttgatgcatccgcgggcccacaggtgtggttcctagggcgcagatgcggtcgtggtcctttaaatgaaaatcgcaggtgcggttggatggaccgcagaagcggtcccgcagaagcgtgaatttggccgcagatgcgaaagtgctaggcagaatgtataaaaaggccccttcgcaaattttggtcattcttcactatttttcatccggatttggagcttttgggagcaatgaagaggaattcaagggggttttcactgaggtcagtaatttgagccctaatactcgtacttcatgtagtttttcgtagtttaatcatgtaattagtcgtcattaagggtgaaaatgatgggttagtgcttgggattttggagagttttgattgaggatttgaggggacaaatggagtcgaattttataaatcttatatgtatggactcgtgagtgaatgaagattctagttttgtaatttttgttggattccgagacgtgggcccggggtcgggtttggccaatttcgagaattttaatttaatttgataatttttgcgtggactttgttcctttcgtatgtattaatgatatgatattgattttagatagattcagggcgatttgagaccgagtcgagcgacaagggcattgcggagtagattttcgtccggtttgaggtaagtaacgcttccaaactggattctgagggttcaaaatcccgagatatgtgttatgtgattagaattgaggtgacgtacacgctaagtgactggcgtgcgaacgtgcactgcgagaattgtgattggtttattacatggcaccgtttagtgattctttcttgttgatattcgtgctcctattgatgtgattaatgtaaacatgctagaagtcatgctagagagtatgttaaggcttcacgccgatacagttgagacccgagtggtcgtttcttgctgccatctcatgtgtttcatcgatattttatacttagtcctatttatgcatatcatatcatgtcacggtctcggttataattgtttggcatattatatcattgatttgggctagtttatgcattgtgagcccgtgtgagtgaggttggtgagtgatgacagagtgaggccgagagcctgatgatgagtggcagttgtgggatcgggctgcacgccgcagcggttatattaatgattacgatatcgcttggcctgtaggagccccccggagtatgtaacacacccccagcgagcgcagagatgttattgagggatggatcttacctcgacatggatcttgtccgagtatttgtacctggagatggatcttccctgggccatgagggccatatacaatattgagtggacaagtatgtgagagtgggagcacatcgtgcgcttcatactgttgatgcattagcatgtaaagtacgttgagttatatatgttaaattgttcggatctatactcatcttattactttgagttgttagttaattgaaagcatgcctaaatttatgtacattgattctgttataaattttgaggtttagttcgtcactacatctcagcccacagtttgggcttgttacttactgagttggtgtactcacattaccccatacaccttgtatgcgtatccaggtacttcaggtcccggtagcacttgctgactattttggtgcggggtttcagtcagagatttcgaggtagctgcctgccgatcgcatccttattttctccttccttatcctccctttagcatttttttattatttcgtacttatcttggagaggctacagaacccttagaaaaatctcacattcttgaattcttgtcgtgtgaatctgttgattctggtaactaaacttctgttattttattctctcacagatggtgaggacatgtgctaccaggaaggaggattagccaccaattgggcccacgaggggtctaggcggcggtcgaggccgtggtaggggtagaggtgcagcccgcgcagcagtcagggaagtacccatagacccacatgttattccaaatcaggtcccagccgcaaatgttccagcgggaccagcccaggcaccggctgtgcctattgttatcccaggtcttcaggagaccttgggtcagatcttgactgtgtgcaccattctttctcagacgatcactatttcttctacaacaaccacttatcaggccgggagaggcactcagactttcgtcgctcgtacctttgataaggttattgagggacttcagacatcgggggcgcctccagcccagccggttgcacctgctcaggactatgtgattccagtcatgcctgacgagcagcgtagattggagaggtttggtagacttgagcctccgacttccagtggtgccaagggcgaggatgcctagggtttcttggacaagtgtcaaaggattcttcgtacaacgagtatattagagaccaatggggtctcgttcactacttttcagttttcaggagccgcttttacttagtgggagtcttacgagaggcgtaggcctgtcggtgcagcgccccttacctggcatcaattttccactctcttcctagagaagtatgtaccatagtaccgcaaagaggagttgcgcatgcagtttgagcagttgtgtcaggatgatatgactatgatgcagtatgagatgagattttcagagctagctcttcatgctgtttggttggttctcatggagagggagagtatcaggaggtttgtggatggcctcacatatcagcttcggattcttatgaccagagagagggtgtcaggtgctacttttgagcaggttgttgatattgcccgagagattgagtcagttcgtctccaggagtgagatgagagggaggccaagaggccttggggatttggtagctttggtggtgttccttctaaaggaacctttcagcatagtagaggccgcttatttaggcctgctcacccagcttatagtggtgcatcattggggcatggttcccgcagttttcattcgggtcgctcatcatttagtacccttccagcctagagttcatcatgtgcaccatcggcccggggtttatctatatatggttcttctagtggatatcccggtgctcggggctcccttcagtccccaccgccttttgtcgagaaagggtgctttgagtgtggagagttggggcatgtcaagaggttttgtccccgccttacggaaggttcatcccagcagagaagccagtcatcaattttggcaccagtcacttcacgacccgcccatctagataggggtggggatcaggcagctagaggtcgccccagaggggtaggctggtcggtggtggtcaggcccatttttatgcactcccagccagaccagatgctatggcctcagatgttatgattacatgtattgtttcagtttgtcaccgagatgcctcagtcttatttgatcctggttccacatattcatattttgctcattttctagatatgccccgtgagtccttagttacatctgttcatgtgtcaactccggtgggcgatactattgttgtggattgtgtctatcagtcatgtgtggtgtctattgagggtctcgagacccgagtggatctgttattactcagtatggtggatttcaatgtgatattgggcatggattggctttccccatatcatgttgtcctagattgtcatgctaagaccgtgaccttagtaatgccgggatttccgagggttgagtggagaggttccattgattatgtgcctagtagagtgatttcatacctgaaggttcatcgcattgaggaaaaatggtttctatcttacttagcttttgtgagggatgtcagtgctgagactcccactattgattttgttcctgtggtacatgatttctggatgtgttccctgcagacctgacgggcataccgcctgacacttttggtattgatttggggctagacactcatcttatttctattccaccatattgtatgacaccgacaaagttgaaggaattgaaaaagcagcttcaggaactcctagataaggggtttattcggcctagtgtgtcaccttggggtgcgccagtgttatttgtgaagaagaaggatggttccatgagaatgtgtattgactacaagcagttgaacaaggttacagtcaagaataagtatcctctgcctcgtatcgatgatttgttttaccagcttcagggagctagggcgttctctaagattgatttgagatccgggtatcatcagctgaagattcgggatgcaaatattcctaagacggctttcaggacccgttatcgccattatgagttcttggtgatgtcttttgggctggccaatgaccgagcaacgttcgtgcatttgataaatagtgtatttcagccatatttggattccttcgttattgtgttcattgatgacatcctggtgtactctcgtatccagaaggatcatgctcagcatttgagagtcgtattgcagagcttgagggaggagaagctttatgcaaaattctccaagtgtgagttttggctcggttcagtagctttcttggggcacgtggtgtctagtgagggtatttaggtggatccgaagaagatagatgtggtgcagagttggaccagactgtcctcagctacagagattaggagcttccttggtttggcaggctattatcgtcgcttcgtggaggggttttcttttattgcttcgcccttgaccaaattgaccctaaagggggctctgttcaggtggtcagacgagtgcgaggagagctttcataagctcaaggttgctttgatcacaactttagtgttagttttgccatcaacttcaggttcttatatcgtgtattgtgatgcctcagggatatgcatttggttgtttcttgatgcaggagggtagggtgattacctacgccttgtaccagttgaagacccatgagaagaaatatctagtgcatgatcttgagttagcagccattgttcacgccttgaagatttggcgtcattatttgtatggggttcattatgaggtttttactaatcatcatagtctgcaacatatgtttaagcaaaaggatctgaatttgcgacaacggagatggttggatcttctcaaggactatgatatcactattctgtaccacccggggaaggccagtgtagtggtcggtgccttgagtcaccgagcagagagtttggggagtttttcatatcttccagcaacagagagacctttagcacttgatgttcaggccttagcgggccagcttgtgagattggatatatcggagcccagtcaggtattggcttgcgtggtctccgtatcttctctttatgactgtatcagggagtgccagtatgatgacccacacttgctcgttcttgaggatatggtccggcaaggtgatgccagggatgtagctattggtgatgatggtgtgatgaggatgcaagttcggatatgcatgcctaatatatatgggattcgagagttgattcttgaggaggcccacagctcgcggtattccatccatccgggtgcagcgaagatgtatcaggatctgaggcagcattattggtgaagacggatgaagaaggatatcgtcagatttgtagatcggtgtctcaactgtcagcaggtcaagtatgagcaccagagaccatgtggattgcttcaaaggttggacattccggagtggaagtgggagcagatcaccatggactttgtagttgggctcccacggacttcgaggaagttcgatgctatttgggttattgtggattggctgaccaagtctgcgcacttcattcctgttggcactacttacacttaggagcggttagctgagatttatattggggagattattcgactgcatggtgttacagtttccatcatttctgatagaggcactcagttcacatcgcaattttggagggtcgtgcagtgagagttgagtacacatgttgagttgagcacaacctttcaccctcagacggacgggcagtctgagctcactattcagatatttgatgacatgttacgcacttatgtcattgattttaggggttcatgggatcaatttctgccactcgcggagtttgcatataataatagttcaatcgagtattcagatggctttgtacgaggatttatatgggaggaggtgtagatcttcgatcggttggtttgagtcgggtgaggctggactcttgggtacagatttggtgcaggatgctttagataaggtgaagtaaattcaggagcggcttggcaaggggcagtctaggaagaagagttatgaagacaggaaggttcgtgatgtacctttcatggttggggagaaggttctgctaaaggtgtcgcccatgaagggtgttatgcgatttgggaagaggggcaagttgagaccccagttcattgggccttttgaggtgcttcagagggtaggggaggtggcttatagacttgctttgccacccaacttgtcgagtatgcatccagtatttcatgtttccatgattcggaagtatgttggcgacccgtcccatgttttggacttcagcgcgtttcagttaaagggtgatatgacttatgatgtggagccagtggctattttggatcggcagctccgaaggttaaggtcaaaggatatagcttcagttaatgtgcagtgaagaggagagtcggtgaaggagtctatctgggataccgagcgggagatgcggagcagatatccacacctatttgagactctaggtatgtttctaaactcctttgaggacgaacctttgtttaagagggggagaatgtaatgacctggtcggtcgttacgagagttttagccatgtttcccccatttctgcttcattatatgtggttcagatcttttatgttgtgtcgggttggttggcttgggttcggagtgattttggaaaggaatgagacacttagtctcttaaattgcttatttagttggaaaagtcaacgggatgttgacttatgggtaaatgatctcggaattggggtttaatggttcagatagcttggtagataatttgggacataagagcgtgctcagaatgtaattcggaggtccgtggtagaattaggcttgaattggcgaaaaatggatatttggcgatttcatgtcggcagtggaaaattagatataggggtcggaatagaattccggaagttggaataggttcgtagtgtcatttgtgacgcgtgtgcaaaatttcaggtaattcagacgtggtttggttgatttcggcatcgttggcgaatttcaggaaatttagaaatccttaggcttgaatttagggttaattcggtgttttgatgttgttttgagtgttccgaaggtttgactgagtttgtatagggatatgtgacctattggtgtaattagttgaggtcccgaggtcctcgggagggtttcgggtggttaacgaaaagcttggaattgagattgtgcagctgaagctgttgcttctgatgttttcgcacctgcggataggggaccgcatgtgcgaggttgcatatgcggtagggaatccgcaaatgtggaatttgtaaggctaagggaagcctcagatgtggtgggtttgacgcatctgcgggtccgtaagtgcggttcctggggcacaaatgcggtcgtagttctttaagtgaaaatcacaggtgtggttgggtggacagcagaagcggtcccgcaagtgtgcgaatttgtccgcatatgcggaagtgcttggcaaaatgtataaaaaggccccttcgtgaaatttggtcattcttcaccatttttcatccggatttgaagcttttgggagcaatttgaagagggattcaagagggttttcactgaggtgagtaatttgagccctaatactcgtacttcagatagtttttcgtggtttaatcatgtaattagtggtgattaagggtgaaaatgaggggttagggcttgggattttggagagttttgattaaggatttaaggggacaaatggagtcggattttgataaatcttatatgtatggactcgtgagtgaatgaggatcctagttttgtcattttttttagatttcgagacgtgggcccaggggtcaggtttggccaatttcgagaattttgatttaatttgtaatttttgcgtgggctttgttcctttcgtatgtattaatgatatgatactgattttggatatattcggggcgatttgaaaccgagtcgagcggcaaggacattacggagtagatttttgtccagttcgaggtaagtaacgcttccaaattgggttctgagggttcgaaaccccgagctatgtgttatgtgattagaattgaggtgacgcacacgctaagtgacgggcgtgcgggtgtgcaccgtgagaattgtgactggttcattacatggcactgtttagtgattctttcttgttgacattcgtgcttctattgatgtgattaatgtaaacatgctagaagtcatgctagagagtatgttaaggcttcatgccgatacagttgagacccgagtggtcgtttcttgctgtcatctcatgtgtttcatcgatattttatactcagtcctatttatgcatatcatatcatgtcacggtctcggttataattgtttggcatattatatcattgatttgggctagttcatgcattgtgagcccatgtgagtgaggctggtgagtgatgacagagtgaggccgagagcctgatgatgagtgacagttatgggatcgggctgcacgccgcaacgattatattgatgattacgataacgtttggcctgtaggagcccccaggagtctgtaacacacccccagcgagcgcagagatgttattgagggatggatcttccctcaacatggatcttgtccgagtatttgtacctggagattgatcttctatgtggggctggattggccttcctcagtactgagtgactaccgtcatatgtgtatatattatgggatggatcttccctggtccatgagagccatatacagtactgaatggacaagtatgtgagagtgggagcatatcgtgcgcttcatacagttgatgcattgacatgtaaagtacgttgagttatatatgttaaactattcatatttgtactcaccttatcactttgagttgttagttaattgaaagcatgcctaaatttctgtacattgattctgttataaatgttgaggattagttcgtcactacatctcagcccatagtatgggcttgttacttactgagttggtgtactcacgttaccccattcaccttgtgtgcagattcaggtacttcaagtcccggtagcggctgctgactattttggtgcggagtttcagtcagagatttcgaggtagctgcctgccaatggcagcctcgtcttctccttccttttctcccctttagcatatttttattatttcagacaatggttgtctttctatatttcagaatttgtagttgtgtcgtctcatgacttagtgacaaccggtgttaggactttatttcagtgttttggttgaatttaactcctaaattagttatttctgtgagaagaatatgattattatttaaatggtttcatgaagaatcgatttgtttgaaattatggcttgcctagttccacgataggcgtcatcaccaccgggatgatattgggtcgtgacattgatgtggtttgatcgaaattaaaccagcaaattcaaaaaaatactttgttaaaatcatggaaagttatcaatctcttgagagattgacaataataaccccgtaaggggctggtcttagtcgtacttccaaaatattaacagtatttaaaaaatagcacttggacccgcatattattattgctcttgaatatattgagcacttggacccacaccgtaattatagtgtaattaaaaccgtattggttggttgcatagtgtaattacacatttaaattaagttttaaatgaattagttataaaaatttaaaagttaatgtaatataaatgattttttataggtatcaatgatattagatttggtatttaatatgcatattttttcttgaatatacattagttagtaagcatatatttataactaatattgtaaaagtaattgatatgtttttttaaattaataatatttattttaattaattataaaaatatatgttttgtaagaacattatggaatgcatgtttgataaaataaattactacttataagtataatagcataacattattcaaatacttgaccaaactaatctatcaattctaacaaacaaaaaaatgaacatcatgcaatgtgaaataataagtcaatactgctaaaataagtaaattaattagaaccataaatataacacaatttcaaaatccaaaaaaatatagtttaaaatatatcaaattccaacataataaaataattttcagtacaacttaagattatgaaacataataagtttcaatacaacttaaaattaggaaacgtaaaatacatggattcccaagaattaaaggtcgaaaaataaaagattaataatgtacaaagaaaaatatattttaaaagtaaaaagtaaaataaataaaaagaaatcaacataacggaaataaaatttataagaaaaacaatttaaaataaaaacaaatggaatgaaattaaaaagtaatcttgtaattatagtgtaattaccaccaattctcacgcccccttgagaatttgagagtgttacacctctccaattacactcaatcccatgttgatcaagtacttacttggccaaacaaacatagccaaacaatgtaattatacccaaatccaattcccaagtggttttccaaatatgctccaagtatatcataagaagaggaataaaatgtaagatcaaatacattaataggaaaacattaaccttcaccctttatatcagtcatatgcataaccataacatagtagcaaccaaacacttgtttaagccttttccccgtcaacatgaagagcaatcttgtccatggtttttgccatcacctctttcgactccttaagcaacttcacactgttacccgatcctaaggcgtttctttgcaaccacaggtgcttcctccagcattatctcaaaaccaccaccaccaaaggcggattcaaaatttaagttttgaaaactatatcctcctcgatctcaaggttaaccaacttttgaagactgaacataatatagagagccatataatccaccaatctaatcaacattgtttttccagtatgaagtcatcctcattttcaatttgaaagcttgatgtacaacatcttcatgcttcctcatatgcccaacatcaacatctccaactccttcaagctacattatcgatttccttttatgctcattcataatcttcatcaatattatttctttagctatgagcctattacaagtagctagtcagtcacccattccgttccaatgatttcacagacccaaacaactgattcatctttccacatactacgttcttcttcataagactgcttctcagttttattcctaacacaagcataactaagtcctatattcacataatttgcagtaactttcttaagtaggccttcaggagcttgatctacccttttcacaacggcaagaatttttccccctgctttgtccaccttctttgatatccaaatggactcacaaatagtgaaactggttgcggctgacagaacattcaaaatcatgcttcctcatgtgttatatataacaacaacaacaaactcagtggaatctgtatgcaaaccttaattctaacttatgaagatagagagactatttccgatagtccctcggcttaagaacaataaaaagggagcaataaacaaataatagcaacaacatgtaataggtaacgacatcaaatggaaaaacgtataataacaaagatttaggattatgaaaatacaagaatagtgcccatactacaaataaggaatgacacatagtgtaataacaaggaactaggaataggaaaaagacaagactagtactaatactttggtaagacaaggagaaacttccgactacctattagcccacaaccttaattctcgacctacggatcttcttgagatttcataataatacctgagatttgttcaaagatatcttctgattgtccatgagattgactcttgttattcttggcaaatccaccagtctaagtcaggaacaccattctttttcactatgagtgttaaagggatgttggatattcccttaccgtgtccaactatcttattagttgcaagaacaatggcctccttaagcaactcatttactaatacgctactaattggcaaaaatttagaaccgaagacaccttttagaaacatttcactatggctaaatattgtcaaaaatcacatccaatgataaaggagtggtataggggacaatcactgcaagaagtgagtgaattacatgggggtttatacaaaataattcgcatgtaactcagtttccagtggatttcctaacgaaataaattccgttggaacaaccttcgtaggtaattattacctgcgaatttttaaatcctcgtgtaacttgcctggcaattttgaattcacgtgtaaattacctacgattttttatgtaacgactcggtcggtcgtgaagtagaacttgaattatattaactgttattgccttgtcataggttggttatactgttatgatgtgttagagttgataggctcggaatcggaatggttgtagcgagaatttagtcatttagtctttaaaaatagccttatagttggaaaagtcaactgagagttgacttattggtaaacaacctcggaatgcgaattttatggttcggatagcctctttaggtgatttgggacttaagagtatgctcagaatatttttgtgatgtccggtgtagaatttggcttgaattggcgaaagttagtttttggtgatttccggtcggcaatggaaaatagtctatcggggtcggaatggaattctgaaagttggaacaggttcgtaatatcattttggatatgtctgcaaaatttcaggtcaatcggatgtgttttcgatagtttcggcgtcgttggtggattttagaaattttaaagttttaggcttgaattcgatgtgattttggtattttgatgctatttttggtgttccgagagtgcaactaagtttgaattatcatttatgatttgttggtaaaattggttgaggtcccgaggggctcgggatggatttcggatggttaacgggcaactttgaacttgtaaaatctgctgtttttttttgtgtcagtgcaacaacaaattgttcatcgcgatcgcgtggattggtccgcgatcgcgtagagtaacctagagcctggtcattttgtaaatcacgatcacgggagtaggagtgcgatcgggaaggtgtgcaatgtggtcagtgcgatcgcgtagagttagagaggcgcgtgtgggggctagtcaattgtgatacacgatcgcgtggtcaggttcgcgatcgtgtacgttcaggtcataaggaactgcgatcgcgtggcatatgttgcgatcgtagagagtatatttgggcagctgaggatttgtgcctcgcggtcgcgatgtgggtctcgcgatcgcgatgaataaagacctgggaagtatttaaataaaccctctgcaaccaatacctacttttccaccatttttgaacgggaagaagcttttgaggcgatttttaagagaggaaatcattgttcttcattgaggtaagattttggaccctaaaactcgattatatgtaattaaggatcaaaatatcagtgtttaattcatgaaaatcagtagaaaaagatggaattaggcttgagaatatgagaccttctagggatgatttgaggggtcaaacgaacaccgattttagagttctttatatgtacggactcgtgagatgacgaagaacagtttggtataaaatttgtcgagttacgaaatgcggtctagggggtcgggttttgactaatttcgggttttgtgctaaaattggtatttttttcaattggaattcattcccttagcataatttgatgagaaaaatatgttctttatagatttggagcacccggacgttgattcgagaggcaagtgtgttgcagaatagttttcgggctagtttgaggtaagtaatgtctttaaatcctgtcctgagggtatgaaaccccggactttacatcctttcacggatctggagtgacgcacacactggatgacgagagtggggcgtgcatgaattggaagtttggaaaaatgaatcttttttaggcaactattaagttgcgaaaccgcttttaaagcatatgatttatagtattactgtgttttaatatacttgggttgtaagccatgtttgaggtctagtgcctatctgttttaaccccttgggggctattttactgatattctcactaatttgaaactatttttacactcagtatttcttgtgaaatagatgacactcttatttgatgatattactatttcttgaaataaaatactattttgggtcgagaaccccatttatttatggcccgagtggcatgctgagagtgtatgactgagtgaagccgaggaccaatgttgtgaggatgttatgatatgagagaggccgagtgcctgagagtgattgatgccatgatttggcttatttatagcgcttgggctgtaggagcccctccggagtctgtacacacccccaatgagcgcaggtacttactgagtgcgagtgccgagtgattgggaggcatgagtgacagtgaggtttcccgagtggctgatgctgagtgactgtgaggtgctgagggaaattgttatgagtgatgattatggcccgatgggcagttttatgatgatattttactgagtttgattatgattcacttcaatttttcaaactgatattttgagagatttactgagaaaacaattaaaaatatacttgtttcaaaggattttctggaaattggttttcgaactcatgtataccgtattgagacttgatgttttactgttttgtggattggtgtaattgtgttgcgtgtttcttattcttcagactgtgatttattttcattactactgagttggcgtactcatcattactccatgcacccctgtgtgcagatctaggtactggttcggagcagtagccgtccgagttcgtcatcaacgtttgggatttcgaggtagttgtccagcgtccgcaacttctccatttcccttccttatttagtattagtattttattcctagacattggttatgacgttagcagagttagtttatttcttagatgctcgtgatcggttgactccagtcctgggggattgtttagactgttaggttatcttattatgttgcttaaagacttagagagatttttatacttattatgctggcattcgatgttattgagtaaatttattaaaataaatgtgtagttatgtgatggtcggctagcatagttccacgatatgcgtcatcacaaccggttaagatttggggccgtgacattttatcgcaagaaatactaataattcgcaagagacttatggtaaaaattcgtgaggaagaggaattacttgtggattttcataaggaaaaatccgcaagtaaattcgtaagaaatttttgacaaatgtttgtgaaaaggataccttaattatttttagtgttatgtttttaatttaatttttctatatttaaatccatcgttgactactatagagaatgggttagtttaaagagagaacttcttacttctctctagagacatgaatagaactcatttcgttttccacaactccattgcactcctggtccgttacctcatctatgaatggactaacaaacactaatacactagaagatgttcccagaacattagtcactctaccaactgatactgagatggaaaacctagaagatgaaacaaggaaacatgcaaaacaacctccatccaaattggaacaaccttaaaataggataacaacaaacccccagaccggagaaatgaccaactggaccacacgaaatcctttttaaataaacctcacgccatcctccaaaacacccaaaacaagaaccaaatagtggtacaataatccattgtaaagtttgacatattggatgaatctaataaccactttgactctgacaattttatccacattacgtcggaggataaggaaagaatctataagaactgggaaaactccttaataaagatctttggcggatgggtaacgtgccaattccttcaacaaaaaatcactgcaatctagaaaccatcggaacctctaacattaatcaacctaggttatgattactacctcataaagttctctaaaccagaaaagtatgagaaagccctccgtggggggaccttggttcatagaaaatcaattccttacagttagaaaatcggaacctaggttcatagactcagaggcatccctaacttactcaaccatatgggctaggttgctagagctcccaacggaattctatgactatgaaatttttcaaaacatagaaaacaaattaggaaaattacttagtattaatgcatgtacatcatcaaccataaggggaagatatgcaagggtttgtattctagcacccatagaaaaccacttgaaactaacatcatcatcagaaatcactaaaaaaaaaataacttacgagggctttaacctactgtgtgaatcacgcggtagacttggacacacacaaaagaattgcccttatattataacacctatagaggccagaaacccaacaaacaaaaaaactcaagaaatagaaagcttaactaagaaaatataccaatggaccattgttacacaccacagggaaaaaaaataccatagtacaccaacaagacaatcaaggcaagaaaccagatctaacggcaaggcaccaattgaaagtaacctaggatcactggaagaaaaactaggacaaccctagaaacaagatttagacgtaagaacattgaaatatccaactatctatgaaactcccttaacacaacaggaaatatactgaccagtgaagagactgcgacgaagcatggtgaggcatttaatgctacctccaataacgacacaattaatcaatcaaacctaggaaacattagacaccaaaaccaaacgtttgctaataagtccttggttaaagacacaagcccatcaaatgtatttaattctgcgaagcatttaatacccaaattcaccaagagcccaaatctgcaagaaaacactgaagaggccaccaaaactctaaagcccgacagacattccttagtaagccctaggaaccaagagcaaataaaaatccctctagattataagaccaaatcagaaacaagcagcaacaacatggatctcgattactccaccagccaagatgatgtcccaatagcatttattagtgataataacccctcaagtcaaaggaaaatttacctttggaaattcaaattagtacaactacaaacacctcaaacgtacatcaaaccaaagccctagagacatcaccacttgactaagacctaatcatgtctgacatgaatatcacacctccacaccatagctcgatcactatttcaagaacctcaaaggaggttactttacacaaagaacaaaaaaccaaccaacaaagtgaaaaaggagaacaccatgacaagattcccaacaagcagctattacaggcgtcataaactttgttggatcaagaagcaactgaagagagagaaagagtagtaaaggaaatacaagtagtagtctcaggtcaaagtaaaaaatggacagtgttcaattggaacatgaaaacgtgaccaaattggtcctagttactcgtcggggcgaagtgaaagaagaggggattctcgaacgcggaaaggatccaatgaattcgaaagaattgaacgaggagccgtatctcatgtacagttctgtagagtggcagtaagggtgacttatctgtcaacttttccactaccaccctcaaaaaaaccaaaggaacaggtgaaatgtatggacccgcgagcaccaaagatcaaaccaccatgcaccataccctcccataaatctaacccaaccaataatctacgccactccaccactaccactgaaccatgccccacaatcatggctagaacatggactgacggtgtactatatgaacatgaaccttcaactaaacggataagatatcatcattcaaccggaggatccgagctacctagctcagattgtgacaaagggtctgagaatagggatggacaacatagaaaaccgcccatggttgacaatgataaacaaccaaagcacacacaaatcaaccatccagtcatgggaacccatccaacatcatggagccatcaactaagaaccacttcctcttccccaataagcctcatcatgaacttgcctctattccacaacaccatgcagcaaaaccaagtcactaatccatactatcaaccaccaacacaccaccaagaccaagctacaccaaccaaccaacaaccacaaagccaagtgacaagaccaactctgacccatctgaatgccatcatgatcataggaccaacagttgttgtggacactacacatctccaagatccaccacatatggaagaggaggacgaagaaaggggatcatcgacaacaagacgaatggtatatggtatgataagggacccaaagacggtgatgttcaaagaaagaaacaaaaaaaaaggcacaccttacgctgcccacttgaggaaattctcgatcaatatacgagaactactcagcaatctacaagtacgggataatgatgatcccaacactatattccaaccactggacaaaccaaggcagtaggttctgggaggtgacaccgcctctgaccagcccaagctaggcgcaaatggagataccctaaaccttaaatagatcaatggaaatcatcatatgtaactatagaggtgggaatgatgagtttagaagaatctttagagccatgctagactataacaaaccttttctggtagccctactaaaaaatgcttgcagaacaccaagaaatcgtcgatgattttggcttcactaaaatgactcaagtcacggcacaaggcaactccggcggcatggtcatgatgtggaatgaatcagaggtgacagtggaccaaatagcaactactggtaaggaaattcacgcaatggttaaggtaaaagattcttcccatcactagattttaacaattatatatgctagttgtttaatggaagaaaacaatatcctatggaataacctaaaaacagtagcaaaatcctttaaaggaccttgcctggtcactggcgactttaatgaagtaactagggaaaacgaaaaatttggaggcctccatataaataatagtagaatttcaaaattcataaattgcttagattattgcggactcctagacatggggttcaagggcgcaaagtacacttggtcaaataagagaaaaaaatcaaacacaataataatggaaagattggacaaatacctagccaattcggattggattaatctgttcccaaaagctcatgtcacactaaaggtgtttaacgggcgggctgggacgggctgcacacaaaaaaaggcagcccgttcggttaatgggttggaaattttcgggctctatagggcccgtacgggttcgggcttaacaagctcggacgggtcgggcttttattattatttttaaaaattaaattaaatttttctttttcaatgttattgatagttaagtatttgcaaacttttaagggttataattaaagcttagaattaaactttgaagtgtaaactttaaactttaaaaagcttaaagatttaaatttgaattttaaaattctaaatttgaaaattgaaagtaagtgggtactaaaaaatatgtaataagactaataggcaatatcaaaaatttacaatatgtaagtaactttgatatttttattgaataatatataatacttcaaattaatttgcaagttcttttttgattttttgatttttatttttgaacttgcaaattaaaagtttacaataatataaaaataaaaaaagaaatagtacatcacatgttttgcatcatttttgtaagctcttccatgtcaacatgaggttcttggtttccggcattggttgaataataggtaccataaaccattatatctccaatttcttgatcctccgcatcatctacctcgtcacgcccttgattttgccgttctgatcttatccaatttctgaagcacactagaatttccgaagcgttgatgcctaatgaatgacgggtatctcctagctgctatcttgcttggctaaatgcgctctctgatgcgactgttgaaataggcgcatttagaacgtctcgagacatggccgaaagaacaagaaattgatttgagttgctcctccaccaacccagaggtagaaaatcctttgtgaggggctccagtgacttttgcaagtagaattcgagttcatcgatattccgtctactggtttgttgatgctctcctagtgtataccaaatcaaataatcttgaacaccatcatcatcttccaaagttgttccagatgttgaagtattacttgaaggaatatttgcatctacaaccgaagaagcatcaacaatgttagcataataattatacaaagtttgtaaatgtttgtgtagatcaaaaatacaagtgtcactatcaggagtttcagttgctccaatatccatataagtatataaagcactgattaattgacgacactttatcattttgatagtagggtttaaaatagcaccaattaggtaaatagggggaattgggaagaaatattttttaaacttatctagcacagattcaacaacaacattatatccgtcttttcaaattatgtagtaaaagagaaatttcaacaatatgaactaaaccatttacaatagtaggataataagctctagaaaactcaagtgtagcctcataaaaattttgtaaattttttacaacatcttcaatgacatcccaagttttagatgttaacaaacagttaggatcggtacaatgagaattagcaacttcaattataggcattctatatttataacaacatcttaggaataaataagtataattccacatagtaactatttcttcaggcatgagtcttggttttagtccataatgtacacatttttccttaaatgcatttaatccagcacttctattatttccttgaattacaccaacatctttcctaactaaagtgatttcattgctaaataagtcaaggccactcttcacaatcaagttataaatatgacatgcacatctaacatgaaatatttcaggaagtggtgggtgtagatgtaattttagtaatataatagcagcattgttgttaaaagcattatcaaatgacatacacaaaacttgcaagattataaaatataacaacttcatggatagtattacttataaatgcaccagtatgactttgatcttcatcatatttaaaagtaataatacatttttgcatacaaaaattatcatctataatggcatataacagtcaaataatcattttcatttacagcacgaccaatatcagaagtaagagaaactctacaagaaatactggcgaacaaataatgtatatatgtctgatattgtccataaagcctaaagatatcagatctacaagtacttctaggaatacctttaaacatagggttataaattttttgaatataagtaacaagatacggtgaagaagcaaaactaaaaggtaaacaacctaaaacaatcattttagctaattatttccggtcttttttaatattgtatttacccattaacccccctgtgctcgggttaattttttgttgcccaccttcatcgattactccccaatcaagagggtgctcttcttccatgtgcctatgaagttgactcgttcccccattcttaccgggctcatgtttataaacttccttacatattctacattttacatatttttttctcattttctagtctatcaaaaaaaaatccaacacttacttcttaatcttcgattcttcttaatagggagaggaggaatacctgttccacccctaatattttgtgtttgactagcattaccaggtgtaggtggtggtgtttcaaaattatcgggtgattgaatatcatctaaaatatcatctaaaccatcatctataccatcatctataccataatttttttgaagccgctcataatctacatttacattttcgggtgaactttcagaaatatgtgtaaagctacaagaagaaccaacatcgcctcttgatcttttgaaaattttcttactaccacatctactagtgcaagcttttttggccgctctaagtaaatcaattatgtaatttaaattaagaaattaaaataataattctaaataataataaaaatgtacacaaaataagataaagaaatggaacgagtgtaccgggattccgaaatgccgcactaattttgatatagaaactcaatcttcaattgataacttgatacttgataccacatttcacttgaataattgaattagaaatttagaatacttgataataataattttgtaatgactaaactaaatatttgatgaaacttgaaagttgaaataatgagtaattgagaatattagcaagagagaattagagtagaaagagaatgaattgtgaggaataatgaagaagaaaggaagctttttatagtttataaaaggctaaaattgtaatttatcaactattagggatggggggggggagggggggggctattttattaatggggtacaattattaggctgtttttggcagatatggttgttggccaacggtcctttttcatatatggtcgttggcaacggtcaaaaattttaaaatatatatatatatatatatatatatatatatatatatatatatatatatatatatatatatatatatatatatatatatatatacacacgttaacgggttgaaccgggctgcagcccgttaagaactcgttaaggccttaacgggttgtagcgggttcggtgcatcgttgctcaaaatctgtacgtttaaaatccgttagccgtccaactcgtcccaacccataatattaagctacagtagcaggctggaccgggctgaccccggttataaacgggtcagcccggcccgacccgttagacatctttatgtcacacacctaactagggtatactcggatcagtgccttatcaagttagatttaaagaaaaatatgtatcttaataataaagtatttataattgaatccatgtgactatctcatcccacattaaagcacctagtaaatgaaacttggaccaattaagacaacatcctaatagttattgaaaaattcactgatagggtaaacaaatggaacgttaatgcatttggaaacatatttcacaaaaaaaaaaaaagtgttaccctattaagactaaacgggatccaaagttcacccaaatacacgactagccaattttttttggatcttgaaaccaatctactagaggaatttaagggactactgaaactagaagaagactttttgaaacttaaatcaagagttcaatggctaaacgaggaaaatgctaacacaaagttcttccatataactaccatgcaacgtagacgaaagaatagaatccttagtcttagagacgaaggagggactagtactatgactaaaaaaaaatattcccatgatcaccgacttttttggaaaattatttaccactagccaaggcctttctcatagaaaatatactccaatttcccattacgctactctagatagtaatgaccaacttgacctaaatttagaactttctatatttgaaattaagaaggccctctactcattcaaatcatataaagcttcgggactggatggtcttcatcctttcttctaccaaaatttttggaatgatattaagaactatttaatagatttttgtaaaaatacgtttagtagttaaaaaatggtagaagaaatgaacaaaacttacatttgcttaattccaaagtgtcaaattgcagaaactataaagcaatttagacctattagtctttccaacactgcttacaggactgttacaaaaaccattgttaatataatcaaactcctcattcaaaaaatcattcatcccaccaagacaagcttccttaaggggagacgtgcctcatacaatgccctcatcgtcaacgaggtaatgaactattttaaaaggactaaagggaaaaagaaaaatgatgatcaaaatagatctcgaaaaagactttcgacaaaatagagtggtccttcgttagattcttattgacttctttaaaattccctcaagagctcataaatgtaatcatgtcctgtgttactaccacatcaacctatttcctgataaacgctttagcacgaaattttttagacccataggggggaatcagatagggagacctcctatcaccttacctatgtatcatttgcatggaaatgctatcgaggctcatccatcatgaaatagactactgtagatgggaccctataaaaatatcaaccaaagggcccctcttatcgcacctttccttcgctaatgacttaattctactagcaggggccaaccaaaaaaactgcaactcaataatagatacactaagcaaattttgcaaccattccggccaaaatatcaattttcaaaaatcaaaaataattttctccaaacactactaccttggaaaataaggaagacataaatcattgtctatcaatgagatgctctaacgaagtagaaaaatacctaggattcccaattatgaactcaatccctcaaaaaaggacttccaatatatcattgatcgtctcaatagtagactaaggggttggaaataaatcacatgaacacaacgggttgaactaccttaatcaaggcaacactagcagctataccaaaccacgtaatgcaaatctttagccttcctaaagctaccctcgaaaacattgacacaactcaaagaaacttcatgtgggggagcacctcagaaaagagaaagcgctatctaataaaatgtgatattgtgactaggtcacaaaagggaggaagactgagattatacaaattaatataaacaaatcttttaatgcaaccctagcatggaggtacgtaaaggagaaggattctctttgggctcgattccttcaaagcaagtataataacaatacacacactaataaatggagtacccttaataaaaagggctctcacatttgaaaaaatatagtaattggaggcaaaatttgcgaaagaggtattcaattggaagtgggtaacggagagtctattaatgtatggcaagatgcttgaataaataattcatcacccttaagaactcttgtccaaggccccttaagtaataatgaacaacacctttacttgacaaacattctcgcaggtggctctattaatttaaataatctctcctttgagttccctaataaaatttgtaacaaaaaaaattagaacctacataaaacaaattcagccagccacaagtacatttggggttaagggatcaaatggtgatttccctacaaaggctgcctatcaaatcatcacaaatcatatagctacatatgaaaatccggtggactatactttgttgtggaagcttgatacgcttaataaaataaaaatatttctctggacaatagttcataacagacttccaatagcaaaattgctctttaacagaaaaattattgcatatagtttatgtaacatctgtgtgtctgaagaaaaggatctggaatatatgttctttaaatgtctccattcaaaaccaatttgggatcaactggataatacttactaatactcaaaccaacctcacaataacttcactatgcacaaatgaactacaatgtcaatcaaaatccaaattcaatagatacatagaaagggatgacatctttcccttcatccgatggaacatctggctacataggaataatagaatattcaacaacaacaaaaatccactccatttggagcacatcattaatagcacaatggatcgaaatataaattgctaacgaattaaaaaaagatgacatgtccaaagatgactatctatataaagtagaagccaacaaacataggattattcaagttaaacattgacggctcatgcatcgacagtccaggaataggggtattggtgaagtttttagtaatagcgatagcaattagatcctgggcttcaacatgtctataccccatgcaactaaatctacatggaaggtctagcactcatgcatggtttaaggatagcgctgcaaaaaataacatgccagtagtaattgaaacagattgatttaataaacatgcttactaaaaactcttgcatctaccaaaatttgataaatgattgcatatggatgcttactagagcgggggagcctattgtgacacatgtgttcatggaagcaaatggagtcgccgatcttatggacaagaatgtgagcaactcaactgtttttggaaatcctatgttgtattttcttccgccaacttttgttgtttctacttttgaaaaatacaatataggaaccttgtgtcctagaatagtcccagataaagtttccttggataaatatcttctttaccaaaaaaaaataattttgttattttgttcttattccatttttgtgttgtctgctattagtttttccgattgtacgtctgtatctaccctctccccaccaaacccccgtctggaaaatcaagtgcatctttctattgttaaccatgaccttgaagaagaacttgaagctcgatctagagctccaatggagtcctcctagagaactctgtgagagaaaatttgtgagagatgaaacagaaattgaaaagtggaaaactgactttctttctcattactgtgctaggtatatacacgtgtggatacaactaatgctgagctggccactaactaactctactcaattacaataaactaacttcactaactattcaactaactatcattacatataacaatataattatacaagtcttaacaccaccacccctcaagttggaggtgttgtgaacactgtcaacttgctcaatatagttgagtgctttactcctgttagaaccttggtaagaacatcagtattttctgttactacatgatgaagtgaaatcagcccctcttgtagcttgcttctgacaaagtgacaatctacttctatgtgtttcgtccgctcatgaaacacatgatttattgctatatgtagagaagaatggatatcacaaaatacttctactggtttatcaaaaggcacaatgagctcttcaagtaatctgaacagccacaccaattcccctactacttttctgagtgccctgtactctgcctctgctgatgatagtgaaatggtctcttacttcttggatttccaacatataggattgttccctaatagtattaagtatccacttactgactttcttgagtctgggaagcagcccaatcacaatcacaataagctctaatattacagtttggatcatgtgacatgaacatcctcattgaggggtcacccttcaagcatctaagcaagtcaaaggttgctttcaagtggagttctcttgaatcttgcattaattggctaagatgttgtacaccataagttatttctattcttgtgttggtgagaaagttcaattttccaactagttttctgtaataggtaggatcacttaatgcagtcccctttttagctttcaacttcactattggatcagtggtgaggcaaggctactatgatccataaagttgtactctttcagaagatcatgcacaaatttcctttgtgaaattataactccatcaactttatagagtatttccatccccagaaagtaatggagtttacccaagtctttaatcttgaaactttcatgtaggaatgccttcagctcctttatctcctctttgtttgttcctgtcagtatcacatcatctacatatactgccacatatattgttgattcagttgtcttctcttagaaatttgagtaatcatacatatagtgggtatatcccttacaacacaatgcttcactcgattttgcatagcactatctacttgcttgtttgaggccatacaaggacttcttgagtttgcataccagatgtccactgtctattaccaagacttgtgtcactttcatatacacctcttcatgtaggtccccttgaagaaaggcattgttcacatctaattggaatatatcccaacctttcttgactgctgcagctatgagagctcttactgttgtaattttcaccacatgactgaatgtttatgtataatcaattctagcttgctgggtatacctctttaccactaacctagccttgaacatctctatactcccatttgccttatgcttcactttatacacccacttacaacatatggcttgtttcccaactggtagtggtactagctcccaggtgttgctggcatgcaatgcttcaaactcttgtggcattgttgttttccatgtaggatgcatagctgcttcctcatatgagttaggctccttgtcactgcaaatgcttctcataaggtactaactatcctggtttagattctcagcaaatatgtgattgtgggcagaggataaggcattcagagaaaggaatgcattggtgtggttattggtattggttttagttggggtaattgtgaacatagtccttaaagtatgtgggaactttgtgtgttctatgaggttgccttggttccaagacatgttcaggtgaggtattccttacagatcttactggtgagttattttgtgggtcttctagagcatgtgaatcaagtgaatatatatattgggggaaagggatgcaggagttggatcagatgaaaaatctggatcagatgacaaatttggacgtgtgacatttgaaaccccttgatcatttgacttagctcattgtcactagacacatggtcaataaaaggaatggatgtaaggacataggtaaatgaatcagtatccttagacatactaaaagggaagatattttcgttgaaaactacatctctagatatatgtgttttcttggtggtcagactgagcactttgtacccctttaccccaaagggatatccaacaaaaacatgtggtatggttctaggttcaaacttatctctgtggaccttaggtattgtaggaaatcacaagcacccaaaactcctcaagtgatagtaggtaggttttatgttatatattagttcatatggtgacttgcccttgaagtgagaagagggcagtctatttattttataagttgtacataggatgcattcgccccaatatcttagaggtaattttgactggaataagatggctttggttgtttccaacaagtacctatgctttctttccactatgccattttgttgtggtgtataagggcatgtcttttgatggataatccttttaaaaaggaataactgatttggttttgtattgttaaactctagttcattttctgaccttatatattggatagtggtattggattggttttcaatcattgccacaaagtttttgatgacatgcagggcattacttttgttggttaataggtgagtctaggtggaactactataatcatctaccatggtgatgaaatatctgatttttcataagttggcatgttttaaggaccccagagatcaacatgtagaagttgaaagatcttggtagaattagtggatttttttgggaatggtaatctctcttgtctttccattgggcagacatagcaggtaaatggctgttttggtgagaaagatgctacaatactggatattctcttcatcttgacaaagggtatatgacctagtctgtaatgccacaacacatttatatcatcacttgaagaaatggaaggactaatactatcacaatggggagttgcacttcattatttgggaaacatgtacttacaactgaatgagatgtgcaattatcccaagacaatgagctatttacagtggaatgataaaaacagtgtgagttctatgtgcaacaaatggaagaaacagaactagcaattgaactatttacaattgattctgaatgggtattcctgagacaccttgggcagaggagatatagtccatcactgactttaccaatttccaaaggtctcttcattgaagggcctgcataagacaaatgttatcagtaaaggcaactatgctataaggagttgaactggttaatgaatggattgatatgaggttatatttgaaggaaggtatatacatgaatttttgcataaaatgatcttaggaaacaatgtcacacttccaatttgtgttacttataccttatatctgtttggaagaactaccaataagggatatggtaaggttacaattttggttaataaataaatattgaaggtcatgtgattggaggcttctgaatctaatatccaagagtctgccttgtttttgaagcattcacaagacaatttgccaaaattaatagaagtatagactattatacctgcaaagttcataacaccattgacataatttgtgcaattggagctctctcttcttgttccaatttgaaaatgttgtagcaaatttaggatctgtccatactgctccttagagaggttgacttgtcttacctcatttccatctggcattgcttcagaagaggtccattgcacactagctactattctcatgactttgttgatccttgcagattggttcatgttctatcctgtatttgatttttgagtgtgtgaatttccaaaattctaagggtacccatctaacttgtaacacttttccttggtatgtccaagcttcttacagtagtcacaaaatggacggggcctattgactcctgttgaattattattgatagagttattcgttctataagaactagatttaacatttagggaagcagactcaaagagcatttgattattggtttgatctctctcttattctcatcctgaatgattagtgaaaaggcttgtgcaagatttgctagcggattcatcatgagaatgcttcaacgtacggcagttgtaacgacccgattggtcgttcgagagtttagcccgttttctattttatcatgtgttgcttaactcagttatgttgtgcggggtcggttggttcgggttcgtagtggccgtggcgaggaatgagacacttagtctcttaagttgaccttatggttagaaaagtcaaccgaaagttgactattagctaaacaacctcggaatgtgaattttatggctcggatagctttgtcaagtaatttggggcttaagagtatgttcggaatgtggttgtgaggtccggagtagaattaggcttgaattggctaaattgagtttttgacaatttccggtcggcattggaaaattactatcggggttggaatgggaatccggaagttgaaacaggttcgtagtgtcattttggatgtgtgtgcaaattttcaggtcattcagacgaggtttggttagtttcggcatcgttgttgatttttggaagttcaagatccttaggcttgaattagggattgatttgatgtttcgatgttattttgggtgttctgagggttcgactgagtccgggtgatcatttatgactttttggagcttttggttgaggtcccgagggccttgggttgagtccggatgggtatcaacatgatttttggcattttggagttattggtgtgaagctttctggtgtttccgcacctgcgggtaggggaccgcaggtgcgagtccgcagaagcggactaggggtcgcagatgcagaatttgttgagttggtaaggaccgcagatgcggaggatgggtcgcacctgcggagtcgcaggtgcggtagtttgatcgcaagggcgggctttggtctttaagtgaattatcgcaggtgcgcacctgggaccgcaggtgcgggtccgcaggtgcgagaattgagccgcaggtgcggtcatcgctgggcagaacatataaataggacccttagcgaattttggtcatctttccaccatttttcacacgggtttgaagctttttgaagggttttgaagaggaaattcgagagttcttcgtggaggtaagacttttggacttaaaactcgtttatatgtgattatttaactgattgagggtgaaaattatggaaattagtgacaaataaattaggaaattagggcttgtaattggagacctttaattgggaatttgaggggtcatttgaggtccgattttgatgttcttggtatgtatagacttgtgggaggatgaggattcttgtgatgtaatttttatcgggttccgagacgtgggaccaggggtcgggtttggccaatttcgggatttttggttaatttttataatttttgagtaggcttcgttccttggcatataataatgatataaatctgattttggtagatttggatcactcggaggccgagtctagaggcaaaggcattgagggctaggattatagccggttttgaggtaagtaacatttccaaacttgattctgagggttcgaaaccccgaactacttgttatgatattagagttggtgacgcacatgccaagtgacgggcgtgcgggcgtgcaccgtgagacttgtgccctggttcatctcatggcaccgtttagtgattattccctgatgatattcgtgcttctatcaatgtgaataacgtgaacatgttaggaatcatgatagattttgtatattaaggtttcacgccgatactgttgagacccgagcggtcgtttacatgcaaacatgctggaaatcatgctaagttaaatgctaaggcttcacgccgaagatgctgagacccgagtggtcgtatattgttgtctccttatgtgtttatttgatttcatatacccagtcctgtcatagcataacattttatgcgtcaatctcggtaattgttaattttacatatttatcattgtttctggctaattcatgcatatgtgagcccatgtgagcgagactggagagtaatgactaaatgaggacgagagcatgttattgagacagttatgagatcggactgcacaccccaacgatactttaatcatgccttcattggcttgatatagcgcttgggctaataggagcctctccggagtctttacactctcagtgagcgcattgatattgagggatggatcttccctggatatggatcttgtccgaagtcgatgatatgtgagggatggatcttccctggacatggatcttgtccgaagttgatgatatgtgagggatggatcgtccctggacatgggcctattcccggaattgaaatccgaggtccctagccatatgaaacagtttttgaagaaaattgtcttgctagttattacaagaaatacagaaatgaaataaaatgtgaaattgttggtatcggtcccgtattttggttccgtagcccgaaataagtttgttatgatatttaaatcctatatgtgaaatttgatgagaatcggagttgatttgacgtgattcggacatccggttgaaaagttagaaatttgagtgttcttgagaaaaatcttaagtttttaggttaaatttgtagtttttgatgttattttgatggtttgatcgcacgagaaagtctgtatgatatttttatacttgcgtcgtatgatatttttagacttgcatgcatttttggtttggaaccacgagggctcgaatgagttttgggtaggctacggagtgtctagacttagagaaaaattgcacagcaaaatctagtgttggcaggccttgcaattgcatgatcaggcttcgcaaatgcgaagtcctgggccagcctcagatctcgcaaatgcgagacccagttcgcaaatgcgaggccctgagaagtcgcaaatgcgactattttgtcgcaaatgcgataactgcggcctatttattggaattttgacggggttttcacctccttttcaattctctcaaaccctatacctccatagacgatttttcaaagacccaaaatcctccaaatcattggtaaataatctttaactaatttctttcattccttaaccactttaataagatttcaacaaaaaatctagagttttcatggtaaaagttgagattgttgggtagaacttaggaatttcaaaatctggggatttagacctcgaattgaggtcggattctaaaatcaattgtatatttgggctcgggagagaatggttaaacgggttttggtccgaacctcgagtttagaccaagcaggtccggggtcgatttttatagtttgataagaaaacataggtaatctatagtctgtcaataaagttaattcctttaagcaataattgatgataatgaaccaatagtgattagattcgagcggattagagataaatcctaaaggaaaagttgtgccagagcagtgatttgcttgagacatcgaggtaagtgcttggtttaaccttgacttgagggaataggaatctccaacttgattgttatgtgaaattgcttgggtgtggtgtataggtgaggtgacgagtatctatgcaccaccaaattatcttcttaacatgatccttttcccgttttccaatttttttgctttctggcttaattatttgtgttcattgtggtttacatgtctatttgttgtcattaatttattgtcaagtattgcttcaagtatgttagaagtgttggttgttcccttggttttgttgtgatacataaagattgagctggatggcagtgttacgatacttatatatatatatatatatatatatatatatatatatatatatatatatatatatatatatatatatatatatactagttggttatattgtgaattgataattgaggaagtttatgagttgtacaactttatgtttacaattgttgagacaaaaatattgtgaaagactttgacctgaattgtgaaagttttcataaataaaaatgatatgatatgtctggtgggagcgggttgcacgccgcaacaaggagtgataagggtggacaggtgggatcgggttgcacgtcgcaacaagtgtaataagggtgacatatatatatatatatatatatatatatatatatatataaatatgtgggagcgagttgcacgccgcaacaaggagcaataagggaggacacttatattttactttttttttaaaactcaaggatttgaaaacttacggttttactttactattttcatattttacacttacttctattttaaagtcaaaatttgaaaatttgaaaagaatttggttatatttgagacttgggaaaaggcagatgagttattttatttattgttacaataatatatatatatatatatatatatatatatatatatatatatatatatatatatatatatatatatatttgttacaggtttatgctacatttgccccgccatagcctcgtcactacttcgtcgaggttagacacttacttagtacatgaggtcggttgtactgatactacacactacactcttttgtgcagatccaggtattggccagagttatgagattttagtagctgatatcatcatttggagacacgaggtagatctgatggcgttcgcatattcctggagtcttctcttagtttgtgtatatactgttttatttcattcaaaatatatacaatattctttcagcccattatttgtagtattcttagtggttcgtgaattgtgacaccagactttggggtagtttatgattatatatttagttcgtggctctgtctatttattcgatgattattttattcatgaagttatacattgaaaaataatagaattagtttagttttatcttgttcggtggtgtacaggtaaatcttaagagaggataattaaataagttctaatattggcttgcctagtaagtgtggtgttaggcatcatcacgatcccgtgggttgagaatttgaatcgtggcataaagttagttagacggttattactgtaggtagtcgattagtccttagttgtgtttgtctatatatagtctttgtaaagatacaactcatttcttagaaaaagataacggagatcttcattttctctctcgaattctctctctgaaattcctctcatcttcttcctcaaacatcctcgttgctgaagcttccagctatgtgtgttatcattctatacaacatataaatatgacccataaaatttgtttacactaaatgataattaaaatatgccatctttctcataactaacatcggttcaagggctcgagagcttgatcccggacttgattgattaaagatatatagtatgtcatgaataattatataatcgttatgaaccttgatgtgacttgatttcgcctttggaatatgaccacatgaaaattgtatatacataagaaatccttgatgttgttttttcagagcttctgtagcctttctttggcttggttgatatatttttagcgttgtgatttcttctcttctaaatgagtgatatgaccattttatatgatttctctcatagaccattgtgcttgagactcatgcatcgatctatttgatagaaagtcatctaataagctagtcatataccattgaacttttatttaaattaagttaattaattttaaattaatctaattatactagttcataacatttcgttagactaatatatgtttaatttatgaaacaagctaaattttttatgaatttaaaattaataaattgtaattatttacaataatattctccactaatatttaagcaaaagcaaacaaattacatactatcttttttttaatctttatttaaatttaaatttgtactatggtcttaaagataacatttatgatctttccaccccggatctactttactattcaagaatcaagaatatgttcactcgaatttcacaatttctaagctctcgtttggtcacagattttgacttcatttttaaatatatttttaaaacatcgtttattcatgaaatatgatcatgttttaaaaaaaaaattcaagaattttcaagttaccaaacactagttagtgaaattttttaaactttaagttttcttcaaataaaatgcgtgcaaacataagttcaacttttaaaaattattttttaacataatttcaaaaaattattttgtaaattcaatcaaatttatgtccaaaggctttgctaaatttcattgatatagttcgaagtttaaataagaactataattgataccaatatagaattcataaatgttgagaaacaatcaaaatcaataccgaatttaatatcaataattccaaaactaatttcaaaaagcaaatctctcaaaactgacccgataaccaaatccaaaccaccgagataaatatcagcctctacttctattttattcttccctctcccgaagccctagcccccaattcagaaaccctaatctctctcgcttcttcaaaccctaatttccatggcgaagaagcgaaaaaccagagcttccgaagccgccgcacaaccagtagaagaagaacagcaaaatattaaacaagaatcagcagatctcgaacccgaacaagaacaagaacaagaacaagaacaagaacaagaagagtaccaaaacgacgccgtagaagaagaagaagcagttcaagaggacgaagaagaaccaaatcccgaagaagaagatgataacgacgacggtgatgataatgaagaagaagaggaagaaaatcccggatctggaaacaacgccgtaaatgaagttaacggaggcggtaatgaggtgatgaagaaggaagaaggaggtgacgaagaagaggatttagaagatgagccactcgagaagcttctagaaccattcacgaaggatcaacttacagcgcttataaaagaagctttagcgacttatcctaatttgaaggataatatccaaaaattagccgataaggatccggcgcaccgcaaaatcttcgtgcacggcttgggttgggacactacagccgaaaccttaacgagcgtgttcgggaagtacggcgagattgaggattgtaaggctgttacggataaggttagtgggaagtcaaaaggatacgggtttattttgtttaagcataggagtggcgctaggaaagcattgagagaaccacagaagaaaattggtactaggatgacttcttgccagctggcttcagctgggccggtccctgccccgccccctacagcagcgtctggcccaccggtttctgagtatactcagaggaagatttttgttagcaatgtggcagttgatcttgatcctcagaagctattggagtttttctctaagtttggtgaagttgaggagggtccacttggattggataagcaaactgggaaacccaaggggttttgtttgtttgtgtataagagtgtcgagagtgcaagaaaggcgttggaggagccccataagagctttgaagggcatacacttcattgtcagaaggccgttgatgggccgaagcacaataagaattactatcagcagcaccagcagcctcaacagcattaccctcagcaccagcagcaccagcagtattatcagcatccggcgaagaaggggaaatattcaggtagtgaagaatttcactatgtttgtgtaggtttttctaatttttgaatacacttgtatacaatggtttaatatggggtttatcactttaaaatgtaattgcagtatttaatagcagtgtaataaattcattgcatgcatataacataaatcctgtgcagtaaagttgatttaattgttaccttaaaaactcaggtggtagtggcagtggagcatcagcatcagctgggcatttgatggcgccatcagggcctgcacccgtgggattcaatcctgctgtggctccagctcttgggcaggcattgacagccctgttagctacacagggagctggtttggggattgggaatttgcttggaggttttagtgggccagtgaatcctcagggtgtgcccccagtgatgaacaatgctggaggatatggtggccagggtgctgctggtggctatggagctcagccgatgcagtaccaaaacccacagatgcagggcggtgcaagaccacagggtggtgcaccttacccaggctatggaggtcactaggaaagcttaaggtgtgatctcgctctcatgctttacatgttggtgtcttatgcttatagagttaattagctacagggcaatattgtattccacgtggaatttcttaccatggactcgagtggttcctgtgcttatttgcattgcttgcatctatattaagggagtgtagcatgtactagtttatatttctatatcatgcccattttaagtttttaatgcatcttcagtggtttaaaaggctggggcactacttagcaatttgtataatgcattattgactataattttaaccagctaggcatttacttaatttgcaaatactttcagatctgagagtctagctagaaaatacttttaaatccgagaatcttggttacaatgttctcctactccatgtaatcctagtctcactgtgtctgtcgtggaggaagtctttgatgcgttgttatgcacgtcgttaattgaaacatagttttgtaatttgtaacctaaaacttgttgattattcaacaatattgcactacttaaggaaaaccatgataaggtagccagaaactgcccatataaaaaaattaaaagttataaatatcaaagaatagacatagactagaaaggtaacatcaatttgcataagaaggtttatggtgttctcgtcttccattttgttgtcttggacaggtatcagtaatgcgatggttgtacttccaagtaagtaaaatttattgatttgtttgtttctcatattcatttggtttgcttgtttatgttactatatcttgcttgtttgttaaatttctgtcttacacaaaagcaatatattttgacttgtctttcacttttctcaaggtattactctcatctgcatttcatgggtttttctgctaaaaatatttttctacttagttttttatgttttacctattcattgtgcagattccttgataaaatgcatcaaacttttagttttggattggtgattcttctgaagttccgggcactctccaaatgaagtcttttactatgacaaaagttaccttttgcttgatcttcaatgtgtattttctttttagtcaagtacttctattccggtgaatgtttttaaacactatgtagtattttgcactaaacttttctatctaaaaggattgagaagacggtaggatatcctatccatctctcaccagtatttgagtatttagcaatgtctttctaaccttcaaacatcttactttctgaatggtttcttctactgatccccacaacatcatagtgtctcataagaagcaacttttgcttttccatcggttcaaagaattgcattatgaacacatcgaatagccagctaatttgttttaaggattatcttgtagcaattgccgttgcaggtaaatggtgatgttcatggcatttcgctcgaggtgtcttctgctttcctccctttttcaatgcttgaagcttgttatgcttgtgtgttaagaatgcattttatgaataatactgaacagtgatttgatctcctcgtcacaaccactggaatatgcatatatatgattaatttgtaaagatttgattttcatggtggggttaaattatttttctttctgaagagtcttttggcttattttaacctgaaatggtggttagagaaatggaaaggtttctgaaatattctgcagaactggtttatcaacagctttgcaaaccacactaatggttcttttctttttgtttgtgtgtgtggggggggaggggggggggtgttccggtggtttcaaagccttttcttgattttaaataccggtttcaaagtcttttcttgattttaaatagaccatcttttggagggagggggaggggtttcctctcctagttgatcatttaacattatgttgtaacatttatgaagtagaggactctaacagaagggtgtgatgcaagaatgccttgtagctttgatgttttgcatccaggggctgagcaggatgccctcctggcatttgagatggttttagccttgtcaaagatggctggcgggtcagatcagcagaaaatgtctcttctccaggacttggttgctctagtgatgtttatatagaaagatggcgaaatgcatagtaagtgatatttctggcatgcggttaataaacggatcaacatttcacttgtgctttgtcattaagaggttttcccctcaattccaaaccggcaccacctgcttggttgagcggagttctcctctttgcacacacaactgcggaaaagaatgggctaaagattcttaaccccgagggtacaaatattgacatgatagaatcctagaagggtaggatgagcttggctttgcttctcttgatcctcaaccgccttccatagaggtggcttaatagccctgttgttttttgctctagttttgagtgtctaggtttgaatcacttagcattgcaataccagtaatactgaaattaggttgatgtggtatcataggagtttaattatgttggtaatagttgttgctttacctgattgacttcagaaaccaagccaaagggaagtaattaaacattgctgattccttccagtaactccatcaaccgtggtttagatggtgattatgttacatggaatgtttcgtggaacatgttctactttggcagacggcaacttataatctttctgagtatttgggtgtgagtgtaggactgtaggtgatatatggtataatataaattacagcatttgtgattagcgtatcacaaagcaagtggtgtggattaacagtgaggatagggtaaagaaaagcttttttttttcctttcggcgataatattttcaacaatatgtacattaactacaaattcatcaaagagaacaaattctgtcttgtcgatccaacattttgactggacagcgcgatggtctgttttagtaggcgtttggacataagaattgtaaaattctaaaaaatggtgaaaatggtatttggacataaatttcagtttgggttgttttagatgttttgtgagcgactgagcaaaatttatgaaaaatagcttttcaaaaattttcaaaatgcatattcaagtggaaactgaaaattttacgagcaaatgctgattttgaaaaagatgtttctttttgggaaaaggaaaagaaaattattatgtctaaacaggctcttaaagtttccaagatttgagttttcaaatagttttcttatgagttttcaagtggtgaacggaggaactagtatcgtgagaatgaattgataaaagattacaacatcaaactagtattagtcgatatagtacccaactcgagatcaacaaggtaaattaagaattgtgaaagaaaaagtattacaactaacgggttaaaattatgaattagatcaaattgttatataacatccttctcgatccactataggcaaaaccttgtacggaggagtcgaggtaaaaattatcagccaatttctactcaatgaaatttgtcaaaattcaaagttgttttccaaggagtatgtacatcgatttcgctcataaaagtgacttaacaatatttgtttcaaaggtttacaagtaagagtgagaccggagaaactcagaaatatcagatttacaagtggcccttgaaaaagaattcacagctttgaaagtaatcgaaatttagtcactttttatgtaaagataaatttgaacgaaaatactattcaaaattcggaaaatattccagcataatatactggaactccagtatattatactggagttccagtattatataccagtcctgcataatatgctggaagttcatacatatgtgttccaatctccagtatattatgctggaacttttcgcttgtgggaggaccatcataatatgctggaagtttatacacaactgtaccaatctccagtatattatgctgaaactttccgtgttgcagcaaaatagtggcaatttttcaataactttgcaaacaatggctattttttaattaccagtttgaaaattggctaacccgtgctatttttacgagtgagactccctggcctaatataccttcaagggtgaagctttctgggggcttttgcatctataccctttttgggtcacattttaatttatacccgctttgcaaaaaaattacaagcgtacccacttttcgcataaacttcaggcatacagggttgaagtaacaaaggcaatcacacaaaactttagcattctagcctttttcaaaaacttcagcagaagttctgaagttatttagttaatttgtaaaaacttcagcactaaataagctgaagttttgtcctggattaattagttttgtcataaagttttttcaaaaacttcagcagaagatgctgaagttatttagttcgttttcaaaaacgtcagcagaagatgctgaagttatttagttcattttaaaaaacttcagcactagataagctgaagttttgttctggattcattagttttgcaataaagctttttcaaaaacttaagcagaagatgctgaagttatttagttcatttgtaaaaacttcagcactaaataagctgaagtattgcacatgtatcaataaggcggcgcctgaagttgtaaaaattagggtatatgttaaataattttaaaaatatgagtataggttaaatgggggcgaccaaatagggcgacccactcaatttttacagcttttcagaatgaccacattttggtattctttaccgcttaagacttttatgtcattttgttttgggtaaataaacaattttatttaccaaatgaatatttacaaagcataaaaacaaaacaagcacctcctggacaaatggcccgaaggttgatctacctatggccgtcagaacttccaataactaccaatacactcgttacctatggcccgaaggattgaaattaagttcatcaagtttctgagcaaatctgggcttcataattcctcggtagtgcacttcttgggtgattactctagtggcaacctcaatgcctctagtcttttgctgaagagaaagcacgagcaaagaaagactatcaaaactctcatttgcctctccacacaaaggacatataacactgtccaaccaataccactgagtcagtctatcgctggttaggagcctcccatgtagtgtcaagtaaagcacaaatacccatctaggagatccttgattaaaacatatcatccttctccactcaatcttttgatcacttggattgaaaataatacacttttgatcaactacaatgtaccgtcatatgataagaattttgaagtccgggaagaaattcgaccaagcattttgtctagcaaaagataacattgtaacacataaatcctctttgatagtttttatgagtccatcaactgtaaagagacctggtcctttaccagttccttctgagttatagatagagactgtgagtaaaagaggcacaagatttttacgtggaaaaatcccaactcaaggggataaaaaccacgacatacattggtaggatttcaacttcactaaaatgtaatctcaactattacaagccacattgtaatgactctcttacaaagacttccacacactaacttgtagtacttactacaagccactttgttactaacttagttacaaagtctttgacttatgactaatgctagtcacaacacaaatacagatagtttatgattttgggtttcctaaaataaggcttctaagaaagcaagataggatacaatggaaaacaaaatacaagattacaactcaactaatggacgcctaagaacacgtagtgaaactgatccgtcttagtggagttgtctttttgttcttgacacacttgagccttcaatgctggagcagatcttcaatgctcttaagaatgttagtaaatgctcaaatgaatatcttgtttgtcttcaaacaagatattatatctcaaggacatcccaagaatgatacccatgcttagttggtacattcctcaaccaatggaaatgactgctgcactgtagcgtgcacagttacagacagtcactttctgccacaactttccagctgtagagttgacttgtacttctgtcaggggagtgtcaagggatcaagtttctaaactgttttctgtgagttcaactgtacactgtacagatttcttgagctcatgctgactggttgtgctgattgcgcatcaggtcttttatctggttcttgacataaagcttgttagatcatcaaaacataagactaccccatcaatttcccccttttgatgatgacaaacttttaaaattgttgaacaattatacagtctaacttaaccagataaagtaccaggtccccatattgttccccctgtctatgtgcttcccccttaatattgttcattcttaattcacgccccatcaaattatcaattatcttccccctttggcatcataaaaaggcacaaacagacagaaagcataaagaagtccaacacaactaactcatgccccatgtgtgcacacaacatgatagaaaacagaaagagaaagtaagaaggcattagaacataagaaagctgattcattaatatcaaaagatttttaaatacatagaagtctttgcttaggaaagcaaagactgaatttggactgttaagatgggagcagcacagtgaaatccaattaccaatcacaaaaagaaagcaaacaaaaactaccaaccacattcaacaaaagcataagaggacaggacacagacagaaacctaagggtcactagaagaggaaggcttggaggaggaagcaaccagagttttgagaaccaggtccatgggggcattgacagacgtttgttcctccagaagtttgtcccgcaggttctcaacctgttacctaagctcagctttttccttggttaggcgggcaacatcctcatgggaaccagtttccccagcagcctgactcaactgagtctccacgatggcattccgagccttcaacttcctgatcacttcagtagcatcattcagagcattgataagttgagatattgttgaagtgctacccccagctttctctaaacattcatattcttctaaggttgtcttggataaggtctgcttgcggatccctactcttaggtttgcaactggtaacttataccaccttttgcatatgttcaatcatgattgcgggcaaattaacaggctggaatgagtcaagggcctccatcaacactaaatcagacttagaggcaatagatctcctctcagtccggggtaaaagcaccttattaactagctcaaggagaagctgataaacagggagcaaggctttcttatggacccggtccccctgctgaattgtcccttcctttacaatggatcttctaaagttcccagtacaagaactcttcacggaagacattcccttagatggtacctgaagtaccgtccccaaatcataatcatcgaacacaatatcaactccttgaaccaaaacacagacatgattgccagcaatggtgaagagggatgcgtaaaattcttgtacagcatcctcatacaccttgggagactccacagtaaaaaggtggtcccacttatagaactctaccatggccacaatctgacgcatcccagacatctcatagatttcagggtcaaacatccaatcccacaacaccctttgactcctcactttctcttgccatctaccactgtcactaggtatagttttcaacgaacctggtcccccaacaattttccttcccctttttctttttcctagttttaatcacagactttcactttgaacattggacaaccactgactctttgacaataccttcatcaactacgactcgcttgagcttcccactactcttcataggtgtcacacattgttgcttcaccccttcatcctaaactccaaccactgactttttaggtttcgaggaccttttcactagggaacttggttcctcctctgcatcctcatctacctccaccacctgaatagattcatccaccaatacttttccttccttcaacagtcgcttctacttctttttaaggcttttcttgctcttttccatagtagagtcaagagcctccttcctttgtaaccgagtagatggtcgcttagaagacgattcaggagtaaccactttcttgcgaagcttgaagcgagcacttaaaaccatctcatcctcatcatcctcgtttgtaggctcagagaggggaggaatggactccataggcgatgtatagaagatgggtttctggttggtttctgcaggaggagaaactggttcctcaccagacttatcgttgacaaagttatgaatagggagttcaaacaagaccatggtcccctcatctcctaagaatggaggttctcccccctgaggctcaggaagggaagaaacttcttcaaaaggaagactcttagaggcaatggacataatattttcggccgcctctttttcaggagactccatgggagtcgtagagtcaaggagagagtagttcagatagtggtatggatcatcctcagagtcttcagaggcctgaggagggtcatttgctagggcttgctttgtttgttcagaagagagaggatcagtggatttcggagagagagaatcagcaacatgtggtgaagaggaaataggtgtggggatgccgacgtctgggagagaggaggactgcacctccgatggaatgggattggagtttgtggtaggagagggagatgatgatttttcgtctgccattttagaaaataaacacagagggtgtagatgggagtataatttgcagagaaaaggatgtgagaagataatgaagaacggttaaggaagatgggggtttataaagggagttgtaataatgagggggaagaggaacgggttcaaaagagaatggcaataggtgttttgggaagataaaacatgcaggagaagtgaaaggatttgagagatggatgtgatagacacagacacggaaaagtcggatgatgtggaaaaagtaattaatttgttactttttgagaaaggcataggaaaacacataactactaacctgtggcacatgaaccaggttttgtgcctgttttttgaaaagtttttcagcttccttatgcactacaatgccgtacctttaatttctgtaatcaccaggcatgtctacctgaaacggtattgatgtgagttaggcttagtcagaaaacactttagccaactgtacctgatagtgactctcatagccaatgtaagggaaccaggtcctcagttaggtttcatcaatcctagggccatcctgcttttctcaaagtgttccatgcttagtgacttggtgaagatgtctgcaatttgatcttaattgcatcaaaacttcatgcaaatgtgtcctttttcaacattatctctgaggaaatgatgtctcacatcaatatgcttggttattttgtgttgaatcaggttctttcccctgttgagggcgcatgtgttgtcacatagaagtggcacactatcaatggataccccaaaatactccaattattgtttgatccacagaaagatgcaactacaacatattctgcttcaactgtggaaagagccgctgagttttgcttccttgtgccctaggagattaggcaagatccaaggaaatgagacattcctgaagtgcttttcttgtccactagataacctgcataatcagtgtcagcataaccaacaagattgaaattgtcacctgtatgatagtacagaatcgggtcctgtgtgcctttgagatagcgtaggatcttttggctaccttcagatgagactccttaggatttgatcgaaatcttgcacacgatcccacacgaaacacaatatttggtatgcttgcagtgaggtagagtatagatccaatgatcccgctgtacattgtttggttgacaggtgatccagagtcatccatgtcaagcttagttgaaactgaaataggggtgtcgatcacttttgattcctccatgtcgaatctcttcagcagctccttgatatacttctgctgactgatgcaagttccctttgtggactgcttcacttgaagaccttgaaagaagttcagttcccccatcatactcatctcgaactcactgcccatgagtttggcaaattccttgcatggtgagtctgttgtagccccaaatatgatttcatccacatacacctgtacaatgagcagattccttccccgtttattcagaaacagtgtgttgtcaatctttcttcgagtgaaccaattgtccagcaaaaactttgatagtctctcataccaagctcttggagcttgcttcaagccatatagagccttgtctaatttgaaaacatattcaggatgcacatgactttcgaagcttggaggttgcttaacatacacttcctccttgagaaaaccattcaaaaatgcactcttcacatccatctggaacaaagtgaattccatatgagatgcaaaagcaataagaatctggatggcttccatacaagcaacatgagcaaatgtctcatcataatcaaccccttcttcctgattgtatccatgaacaaaaagccttgctttgttccttgtggtatttccattttcatccagcttattcctgaacacccacctggttcctatgatggttctatctgagggtcgaggtaccaggtgacaaaccttgtttctctcaagctgatgcagctcctcttgcatagcaacgatccagtatgcatccttcagagcttccttgatattttttggttctatttgggataggaaggctgaaaaggctagggagtttctggttttggatctagtttgaacttctgaatcaaggggagtgattctgttatcaaggggatgaaagcttttgtgtttccaatttgggacttggatttggtttgtggaggaacttggtatatcagaagagtttccctgcatattgttccgcaacctgtggagtaccttgcacaacatctctaactctttcttcagcttcagtggtagtaattggggtaccaggttcctcatgtggatttaaagaagtgattgcattgtcttcacttatttctctcatctgtctcatcatgtcaactttgccgtttgaaacatcagatatttctccaggaaccaagagtggttcattgtcctgatcatcaccatttcctttcttgtttgaggaaggtgtctcattgaatagcacgtgaacacactcctctacacattgtgttcttttgttgtacactttgtaggctttgctttgagatgaatatcccaaaaagatttcttcatcactttttgcatctcctagttggtccttcccattgttaagtatatagcatttacatccaaagtctctcagatgagttatatttggctttatttcattgagaagctcatagggggttttgtttaggagggacctgatcatgcacctgttaaccaagtagcatgcagtgttgattgcttcagcccagaatttttttgcaatcccactatcaatgagcattgtccgtgccatgtcttccagagttctgtttttcctttcgaccactccattttgctaaggagtccttggagctgagaaattgtgagtgatcccattttcattgcaaaactcatcaaattttgcattgtcaaattccgttccatggtcaaatctgatgcaagatactttcaactccattttcttagctactcttcaactccgttttcagatctgatgcatgaccacatagatccatgtgaagaagttcaagaggttttgatgtgctaacatccttttttggcttaaaagatgatttcacatgttttcctctggcacacgcatcacaaactctgtgctccttgaactttgagtttggcagactacgaactaggtccttctgtatcagattattcaagagagaaaagcttgcatgaccagtcttctatgccacagttctgcatcatcatcaactgtctttaagcagttcacctcaccagcttccagcgattcaaagtcagcaacatagattttcttgtgtctcttggctatcaaaaccacttcaccaattactaggctagtaaccgtgcatactttggacaagaattctactttgtttcctttatcacatatttgagaaacactcaagagactatacttcaatccatctacatagtacacattctcaattgagtgttcaagagatcttccaacccttccaacaccgagaatgtacccccttttttccattgccaaatgatacatctccttcttgcagggctttcagtgagagaaaattcatggtgttcccagtcatgtgctttgagcatccactgtccatgatccattgtattcttgttcctctcactggtccctgcacatatgaggaaaaaggtgaataagagctcttctagtccatgcaggcaagagtcgatttttcttagagggacatggtcccctttttggagtcaccttgtcagcaaacactttgtttttctgaacagattgaactctggcaggacaactttttttgaagtgcccattgttctcacagtgacatacttgctgtgagggttgtaaggaattttctccttttggaacccgatcccctgcctgtttccactgttgttaaattacttggaagtgacagcatctgtggaccaggtccatttaagtgatttttcaagatcaatttttagtttaacaatttcagcttgaagttgcctgtttttctcaagttcacagcacaagcttgctttgacatcatttagttccttttcaagcttaatgtacttctcactagctacctccttcactttgtctatactcacttccctatgttctaatttgagttcctcaattgtttctgtagacgtgtaatttttgaccctcccagagattttatacattttagcgtttaatatttagtttaggcctaatatcgtcattttagctagttttaactcttttactttattttaagtacaaaaattaaaaatatataaaaaatgagtttattttaatatttaattaattaagttttaattaatatttttagaattataaattttgtatcatttttaaaaggaagggtgagtttttgggttgtaaagtccattttttggtctttgacccaatttcaaaagtccattccccttagcccaatacccactaacctaaccctaaaatctatactcattcttcaaatacactacacccttcatctacagagaccgagaggaaaaaatacatacagaacaaaaagaggttgccgtcgctacgtccaactgccgcccagctccggcaagattccaccacgccagcagccacccacaccaccccatcgccttattcttcttcataacacagcgccacacctccaccagtcacccacctcacttcttcatcttccacagataacacacagtaatcaaaagagaccccgaacactctctcctcaccactccagtcgtcgttcccccatctaccaccaaactgccgccgccttcttcacgccaaacaaccaccctcaactctcccctccataccacctccggaccacctcccttgagccaaaaaggaattcacgcacacacacacgaaaatggctgagaaaacagagtagaacactcgatcggggaaagcaaaacacagagtttgcccggaaatgcaacaatcacccaaaccagctcgtgaaacctcctcaaaacagcccttaaaccatcgcagaaacgccccaaaccagtgtgaaaatgcttgaaaccgccatccaaacccagtagagatgagtccgttcggggacaccgatttcagtctgggtttctaatctgtagctcgtttgaggatcgttgttttgctcgtttgaggatcactgtttttagagcttttatattcattgtatctgcacccaaatttcagcaattgaaggttcgttcttttatttactcattggttatttacccgtatgttttgttgctagcgtgcacgaaggaatatacatcatggcattccagttccttttattgatctttgtctcatttgatattaattgtattcttatggtttaataaagtatgaatggatgctatgaaatggaatttggggtttgtttgacatttgaaaagagaaatcagttttttaaacttggtcagaacaagctaatcggccaattttgtcttttattaattgattttgccaaatataattccaagtagaaggaattttctaagcgccagttccttaaggcgcgattaataatataatcatcgtgggcatgggtacagttcccgtggcatggttacgatctgcaggacccgactataacttcaaacaacaataaaaattaacatgttgtgaattgcgggtgtatttcacgtagcgcaattcgcaatgtgtataataccgtaagtctaagttcgggtgtgcatttcatgtgacccggttgcaactttgtttaatatgaaaaatatgtcgtaaatcgcgggtgcatttcatgtgacgtggtttccaacgtatatttcgtaaataactaaaagcggctagaagttaaaaatgcacaataggttctaaatatgtaaataatcagataattaagccaattattaatagtttagcgaccggttaaaaccacgtaacccgggaatgccaaacaccttctcccaggttaacaaaatttcttacccggatttttgtgttttacggactgtaaaacagagtcaatctttcctcgattcgggatttaaaccggtgacttgggacaccataaactatcctaactggcgactctgaattttaaataaaataatcccattcggattgtcacttaaattggaaaaactcccttatacccttccagggtagtaaaaaggaggtattatagctctggcgactctgctggggataagaacccagaatctctggttcagggttcaagaattcgagcttagaataactgttatatttggctttattatctgattttacatgtttgaacttaatgtgctaaatgccaatttttaccgctttgatattgtttggactgtatataaattgttacgaaaccctcttctctctgagtcttctaagtcgtctgggaagtgtgcacttcgtgtgacttattttctgttagagtcatatccaaattttagaacgaggtttggacaagttgcaaagctggtgaagcttatgtattcccggtacgctgccccccctcggctggagctgtccgctcgggtaagccaggtctagaacaaaaccctaggatttaaacttagaatgacataaccttatgccggatccctagtaggaacgattatttgcatcatgttcatttggcttaggggactcaacacaggggttgggtccgtctaggacaggtgtacccaaaaaataaaagatcatcttgaagcattttatgtgctatatgttgcattcttcaagggtaaaaagggtcatttggcagaccaatgatagtagaggataaatgagaaagaaaagagggttaagtatgaaaataaagcaaatagggctaattatatatttctttcgtaaatttatatattttctttcaagaaaaagataaaaaaaaaatgaaatataaagaaaaatattttgcacgttcccttcattttgttaaaaaaatatatagaaaaaaagagaaaatgtgttttttttaatctctctcgtatccaatctgcccgaactacgcaaatctgattctcgtctttcgaggcgtgatacgtagggaacccacatagggtccggtattcttagtgagtcttaggtctttggcttcgcggggtcttagccaaatcttgcatgcttagccatttttttagccacataagtcatttctacaaaatgggtcgtttttgtaaagtaatttttccatgtctttgaggtcacctttgttgagtttgcaccaatagaacctttggccacgtaggttattttttgcaaaaatagctcaatcatgtcttgcatgtgtccaataggaggtgttgtggcgtcacattgcgtctcgagtcactaactctatttggtcttatttttctcatacaggtgtggattttcttaccagagcatgacagataccccagggccattccagtcaggaccgttgcatacacgagctgcttgaagaaactttttattttttactctatttcatgttgtttgttaattttagtcttgaacagtagtatcgagtctgttagtctagttaagattgtcaagtcttttgttatagtacttcctgttttgtatctgaaaaaaaacaaaaaaaaagttataaatgaaaaattcaaaagatttttgtttttattagtttattttattcattatttttccggaactacgcttggtctgattcatgtggaacatgatacgtaggcaatctacatagggttcgatcaattcattaaacaaaaattatcaaaaaaagaaagaaaaaaagaaaaaaaggggggaatgaatttgtgggacgtgagggcgagagaaagaaattaatgataattagaaagaaaagagaggaaggaaaatgagcaagtcaagaagtgctagaaatgaaagaaaagaggaggctgaaatgaacaaaattgggataatgccaaatgaccttgtgaccctcaaagccattcataaatcatcaatcattgccaggtgcattgcacgcaatgtgatatttctatatgataaatgccctaatgctaacatgttggctttgtttttctcctctttggtattgtgattgttatcataacagagggtagttagtttgtggcactttggcgagtcatccatacaacacaaagtcagaaatcaaggtagccatggctagcaaagacttggccacaggagttgtggacccgccgagaaaaattgttgaatcggaatcggaactgagagaagaggtcttaaggttgaaaggacaggtggctgaaatataccaagattggattagtgggcgtcctccaccattatttcccactaactacaccgaaagcctcatcacaattccgccactatcacaaatccagattcccactactgctgatatctccccacaaccttttcatactccacctcccaaaaccacctccaccccatatcccgctcctttgaccactcatgtttttgtagctcctccaccaactactcttcctcattcctctggcgagactgtgttcaaagtccctaatgcccaacgctatgctccagaaccaattttcaaggtctcagatccgtactcttatgctccccattttgagcctcccggtgaaactgaaaagcttgctaagacattggggcacgatgagatacccagaaagctgaaagatatttgtctgtttgtggggtctaaatgccaaagtttaacttatatgatgggcggggagatccagtagcccatctgaagggttattgtagtgaaatgaggagtgttagccggaatgatgaattgttgatggcgtatttcagtgagagtttgagtggagaagccttggagtagtatactcgccaggatgtcagtaagtggcatgcatgggatgacatggctcaagatttttttcggcactatcaatacaatgtagacattatcccattatgctcctccctatctcagatagaaaagaaacccgagggaagttttggggagttttggctcagatggaacgaacaagttgctcaagtcagtcctctgattgatagaaaagatgttgttcaaccctgccaacgtcaggatccagtgagcattcctgctaaacactttcatcctcaataccgaacccatggacatcctcgtactccatataatcctcaccaatgctactttcctccacaaaatccccaacgtcataccccacattcccaatactctatccacaatgcaccgccgtatgctccacacccacgaaacccgtaacggctggcactgcctccacaaatgtcttacccgcctctacaagcatgtcaatcacctaccctaaagaggttccaaccaaggctggagtacaaaatgagaaggcaacaacaaagaaatagttttacgccgattggagaatcctgcacaagcttgcttgaacagttgaaacattctggcctgattgagacgctccttggctacactccagacccatatgcaagaggttttgatcctactaaacggtgcatgtaccactctaatgtccaaggcatagcattgaagattgtcatgctttggaaagggaaatagaaagaatggttcaagaagggataattgtggtccaaggcagtaataccccaagtgtcacacataatcctctacaggtacatgataacgtacaaattgttgggacattttgcaataacgaaaggttggtcgaaggagtcaatgagcttcctggtgaagacaatgtgattgaagttggcgaaggttccagtaattttgatgtgcaactcagtggctaagatctcgatcttattaattagaaagcacctcatttcctcgccgggaaggaggcttggcagttcattttgacttcttttctactatctggttatttcggggttgtaaccagattttatcttattgttttggtgattcaaacccttccatcctcttttgcttatctctaggagtcttgttagctagttttgtgtctctcagtttgtcatctaggtttgttttggtgttgttcaaacccttccatcccttggtcaaatgagattttgtttttctgttatttgcagtcttcgtttagttcttttcttgtatattgttcttttcaggccagtcctagtgacatgacatgcatgcagagtttttagccagatcttgaaatccaatctaatcatggaataatgaaacatggttttgaatatgataaaagatgcgtttgaggaaacaagtaaagattcacacatgttgagataacttgaagcttgaattgagtgaaattgaggcaattagtatgagaaatcaagagattgataaaagcatacaacaaggaaatgtgtctcaaatagtttgagatggatcagtcagtgttgaaacacatccttccacatcaggatgaagcaaaaggcaagttcgccccgaactggcaggggccggtcatcgtaacgagagtgttgtccaatggtgctttgtatttaacagatatagaaggcaaatgtgtagatatgactatcaattcagatgcagtcaaaatatattatgtatgatttctttggtttaaattgtgtttgtttgtacttggcatgttttgaagattggaataacgaagatattttattctactatctaaacactttaccctttgttacccctttgagccttatatattttatttgatacccctcttttggaatcagtagcaaagttcagaaacacggacacaaaaggtaaataaagaaggaaaagaggaaaatataagagaaaaagagaaagaaaggaatgaaaaagagtggggggaaaaaagaaaaaaagaaaaaaagaaaaaagaagaagaaaagaaaataataaaaaaaaagaagaagagaaaagtaacacaataaatcaattcctatgacatgaactacgttcgacctgattccttttaaggatacgtaggcagcctcacggttcggtcccatctaaataaaaattcaaaagccccaggcaaagaaactgggctgaaattgtggctatataaaaggtctgattccaaagttgtaattgtgaacccactcaatttgttttgagcctttatcattcctttctaaccccatccaaagcccgcattacggtccaaagaaagaccctccgaccaatatttgagagttccaagtcaagcgagacagaggtatgattcacaccaggggcaacactccgtgccgcacaaaggaaaacaaataaatgagagagtcctgttggtgaaaaacctcacgggcaccctaggacgacagaaagatgagagaagtcaaaatgtgatagtcttattggtgaaaaccttcacaggcaccgtaaggcgacagtgagttgagagatgaacaaatgagagaggtctgttggtgaaaacccttcagggcaccgcaaaccttacaaggttagtggcttggcgaagagattgggttatggagatccgggcataaggcatgaactgaaaacatgattggttagatggattaggctgatcaatccaaaatgcatgtcatgatcattggagtcagtcgcttcactcaaataagtcttttttccattcttcttcacataagtatatttgttcaaaattttccttcgttccttctgccaaaaatcacttcattgagctctttgagtgtatctttatgagtctctttcgagttagccttgttgaacaagcaggaaagaattccaaaacgtactaccagcttttaaattgcacaaagcggagttcggccaagcacatcacacgtgacatgatttagaatgagcagtatggtgataactgaagttcaagtgataaggtgattcttgaattttgaaaaatacaaatatttggcaactttcagaatgaaaacacaatgcaacaagtgaatgtaagaggttcaggtcatccagaggttttgtggtccagtttcgaccaaaaggtcaaacaatcccttgctggaccgacgcagctcatcggaatgaagcatggtagtggcagaagcatacactcagcaatgatgccacaaactaaccaccacattttcaaacaaacaagattttatttgtctgaaacaggggtaagaaaatttgtctgatttgcagggacccttcacgaggaaagcatggttcaggggcaaggcattttgttctttctgcagagatcatctagaaaagagagcatggctcaggtaagtacattttaagttttcaggacccgcctggataatgggatttaatttgaagttttcaggaccctcctggacaatgggacttagttaaaattcaaaacatccatgagtaacaagatctagcattaagctctactttgaggaaatatagttggtgtcaaagttttcattcttaagatgagattcagtttgaaattttcaggaccctcctggataatgggatttagtttaaactcttagagattttgggtaacatgattcaactaacactcacaaatgttcctagtacaaactggggcagaaaattttctttgttttgtttgttttgttgtgacttcaagcacccaccaggagagcagggtcaatgtttggtttacattttcaagttcaagaggcatcaggcgcccacctggagaacaagggaatacatttcaagtttttggcaatcaggcgctcacctggagaataagggaatgcattttcaagttttggtaatcaggcgcccacctggagaacaaggaacacaattcaatttctggtaatcaggcgcccacctggagaacaagggaatactgttcaagtttttggcaaacaggcgcctacctggagaacaagggaatacaatttcaagttttggtaatcaggcgcccacctggagaacaagggaatacagttcgagttttggcaatcaggcgcctacctggagaacaagggaatacaattcgagttttggaaatcaggcgcccacctggagaacaaggaatacagttcgagttttggcaatcaggcgcccacctggagaacaagggaacacagattcaagttttggtaatcaggcgcccacctggagaacaagggaatacagttcgagttttgtcaatcaggcgcccacctggagaacaagggaatacaattcaagtttttggcaatcaggcacccacctggagaacaagggaatacagtctcaagtttcggcaatcaggcgcccacctggaaaacaagggaatacagttcaagttttggcaattaggcgcccacctggagaacaagggaatatagtttaagttttggcaatcatgcgcccacctggagaacaagggagtacaattcgagttgtggaaatcaggcacccatctggagaataagggaatatagttcaagtttttggcaatcaggcgcccacctggagaacacgggaatacagttcaagctattggcaatcaggcgcccacctggagaacaagggaatacaattcaagttttggagttcaggcgcccacctggagaacaatggagtacagttcgagttgtggaaatcaggtgcccacctggagaacaagataatacaattcaagttttggtaatcaggctcccacctggagaacaagggaatacaattcaagttttggcaatcaggcgcccacctggagaataagggaatacattttcaagttgtggaaattaggtgcccacctggagaacacgggaacccatttcagaattcaattcgcgttagcaacaacagaagctcgcccaagaatgcgagtcgacaacacgagatgatcaacagaagtagtctcaatctagaataaaagaagaaaaacaaaaaaagaagtatccaagtgcagaagcagagacaagatatggattgctcaagacatgactgagtcacaagctttgcatgtcccgtcgtgcttcgtcgaagccgtggaagaataaatcagcacccgcaactagcaagcatcaaggttcaaatttaaagtctgcatgaagaccattcaagactcaagatcaagcttcagaagacttataaataggaatcttgtaactcatagttgacaggtttagttagtctttttaatttttgttattgatgtaataacaaggtcgcggaccggaatctcgatcggctttttcacctcggtatactccatcactcttcctacctctgaactatacgtggcctgattcctttatagccaaggatatgtaggcagctcggataccagggctcgatcacattctccttttctttaagtttttggtctctctaaataagggtcaggtcaaaaaaatcgtctagtcattatttgtctgaaaactcttcgtgtttccagtcaacgaggggcatctgtagacgtgtaattttttagtttaggcctaatatcgtcattttagctagttttaactcttttactttattttaagtacaaaaattaaaaaaatacaaataatgagtttattttaatatttaattaattaagttttaattaatatttttagaattataaattttgtatcatttttaaaaggaagggtgggtttttgggttgtaaagtccattttttggtctttgacccaatttcaaaagcccattacccttagcccaatacccactaacctaaccctaaaatctatactcattcttcaaatacactacaccctttatctacagggaccgggagggaaaacaaacatacagaacaaaaagaggttgtcgtcgctacgtccaaatgccgcccaactccggcgagactccaccacgccggcagccacccacaccaccccatcgccttcttcttcttcttaacccagcgccacacctccaccagtaacccacctcacttcttcatattccacagataacacgcagtaatcaaaagagaccccaaacactctctcctcaccactccagtcgtcgttcccccatctaccaccaaacttccgccgccttcttcacgccaaacaaccaccctcaactctcccctccatcccaccgtcggaccacctcccttgtgccaaaaagtaattcacgcacacacacacgaaaatggctgagaaaatagagtggaacactcgatcggggaaagcaaaacacagagtttgaccggaaatgcaacaatcacccaaaccagctcgtgaaatctcctcaaaatagcccttacaccatcgcagaaacgccccaaactagtgtgaaaatctgcttgaaaccgccatccaaactcagtagagatgagtccgttcggggacgccgatttcggtccaggtttctaatttgtagctcgtttgaggatcaatgttttgctcgtttgaggatcgctgtttttagagcttttatattcattgtatttgcacccaaatttcagcaattgaaggttcgttcttttattttttcattggttatttacccgtatgtttttttgctagcgtgcacgaaaggaatatacatcatggcattccagttccttttattgatctttgtctcatttgatcttaattgtattcttatggtttaataaagtatgaatggatgctatgaaatggaatttggggtttgtttgacatttgaaaagagaaatcagtttttttaacttggtcagaacaagctaatcggccaattttgtcttttattaattgattttgccaaatataattccaagtagaaggaattttctaagcgccagttccttaaggcgcgattaataatataatcatcgtgggcatgagtacggttcccgtggcatggttacgatccgcgggtccgaatttgggtgtgcatttcatgtgacccgactataacttcaaacaacaataaaaaataacatgttgtgaattgcgggtgtgtttcatgtagcgtaattagcaatgtgtataataccgtaagtctaagttcgggtgtgcatttcatgtgacccgcttgcaactttgtttaatatgaaaaatatgtcgtaaatcgcgggtgcatttcatgtgactcggtttgcaacgtatatttaagccaattattaatagttgagcgaccgtgctaaaaccacggaacccgggaatgcctaacaccttctcccgggtaaacagaattccttactcggatttctgtgtttcgcggactgtaaaacagagtcaatttttcctcgattcgggatttaaatcggtgacttgggataccataaactatcccaagtagcgactttgaattttaaataaaataatctcgttccgattgtcacttaaattggaaaaactcccttatacccttccgggggtagtaaaaaggaggtgtgacagcttcctctaggtctgtgattaccaccaaaagatcatctctttcttgttcaacaacattgattttctcagctaaagtattcttttcattgctcaggttttccactgtttctttcatgtctactaccactacagttagatcatctctctcatcttctgcactatttgtcttttcagctagcgcttccttttctttctcaaaattacttatggtctcttttaagtacacaactactactatcaagtcatctctcgcattttctacactgtttagtctaaagttagagatactttttccttttcaagatcacttatggtttctttcaaatctaccacacaaacgactagatcatctctagattgttcagcttctcctagctctatggtcaaggcatctttatcgtcaactaaactgtagtaagcatcaataagaacattttctaatgacattaattttttagaggagtaggacttcagatttctctagacatccctgaaatttacctcatcattctcatcctcttcatcatcatcagactgggccattagagcgaacaataaatcatactccttggcctcgttctctactgccatcatggaactgtttcttgcttctggttcctcttctgattcactagaggaatctccccacgtagcaagagcttgcttcacagcattgtcagatgcactttttcggctgaatcgtttatcaggaacctggttcctctttgttgtcttgtcaaagttgtgcttgtaaggctcctgcttcagaagtggacagtccttgatgaagtgccctggctttccacacttgtgcaaagatcatagttccttggtttgcttgaactgcctcttcttagtataccactattccatcgaaccatcttttggaatctcttagtaagatatgccatgttactatcttcttcacttgagtcattgtcttcagctttgagaaccaggttcttctccctttttggttctcttctctcactgtctttcttcttcttcaactcgtatgtcttcagattcccaatcaactcatccatggttagagtttgtaggtattttgcttcagtaatagcattcaccttaattttccaagaactaggtaagccactcagaatcttccgtaccaatttgtttctaggaattatttcacctagtgagtgaatctcatttatgatggaagtgaatctagtatacatgtcttgtatagactcgtcatccttcattcggaataacttgtactcagttgtgagcatgtcaatcttggactgcttgacctgagttgttccttcgtgatcagtttgcaaagcttcccatatttcctttgctgattgacaagctgagattctattgtactcatcagtcctataccacataccaaaattttcttggcacggaagttcttctccacagccttcctatcaacgtcactatattccttcctggtcttaggcaccaacaacccatcttctccaaccttcttcataggaacatgtggatcgtcacaaatgacatcccacagttcggaatcttcagccattataaagtcatgcacacgagttttccaccacccgtagtactgaccattgaatctaggaggtcggtatgttgattgtccttcttcaaagttgagtggagcaaccattagagatcttttctaggtgttaaccttttagaaagaacccactctgataccaattgataatttttatgagcccaccaactgtaaagagacctggtcctttaccagttctttctgagttatagatagagacagtaagtaaaagaggcacaggatttttacgtggaaaaattccaactcaaggggaaaaaacccacgacctacactggtaggatttcaacttcactaacttttaatatcaactattacaagccactttgtaatgactctcttacaaagacttccacacactaacttgtagtacttactacaagccactttgttactaacttagttacaaagactttgacttatgactaatgctagtcacaacacaaacgcggatggtttatgattttgggtttcctaaaacaaggcttctaagaaagcaagataggatacaatggaaagaaaaatacaagattacaactcaatcaatggacgcctaagaacacgtagagaaattggtccatctttgtggagttgtcttcttgttcttgacacacttgagccttcaatgctggagcagatcttcaatgctcttaataatgttagtaaatgctcaagtgaagatcttgtttgtcttcaaacaagatattatatctcaaggacataccaagaatgatacacatgcttagttggtacattccttaaccaatgggaagtgactgtcttgtttctgcattgtagcatgcacatttgcaggcaatcactttatgtcacaactttccaactgtaaagtcgacttgtacttctgtcatgagagtgtcaagggatcatgtcgctaaactgtttcctatgagtttacctgtacattgcacatatttcttgagctcatgctgactggttgtgttgattacgcatcaagtcctttatctggttcttgaaataaagtttgttagatcatcaaaacataagactgccccatcactcttagaactaagagggactccaagataactgaaaggcaaattaccttttgagaagccaagtttctgtagaatctgttattgtatatgtggcttgacccgtctaaaatagatggagcttttatcactgtttgccactagcctagaggcttgagaaaattctaggaacaactcatataatatctttactaaaaattatattggagagtcttcagcaacctcgccaagtattctataactaacacaaacaaaaatggagacatattgtctccttgtctcaagcgtttcttttctgaaaatggcgtaaaaggtttgccattaataagaatagagtaagatgccgtattgacacaattcattatccactttacaaaatttagcgggaaactgtagggagaccaaaatttgctctaagaaacaccgttctactgaatcataggctttccttcaatcgtcatcatacaccttggaataatcctttcctatcatatcctttaatcggttcataaatcaaaataatgttatcactaataatcctttttggcacacgactacttggcttttatcaactagtgtattcatcaccttctggagcctcttagttaagccctttgagactattttatcaacaatagataggtctatattcagattttagaggggttctgcaccttaggtataaatgtaacaaagttacaatttatggccttatacatggtacctgtggagaaaaactctttcacggcatcagtaacatcttgtcctataacattccatgcgttattgaagaataagcattatacccgtcacatcctggagctttggcatctgtaatctcattccgtgcataccagacttcactatctattactggcttaattgagcaaaagttgagcatccctttccaatacgggcccgttcccataaaaatgggatttattgcaggtaaactatcaacaacagaacctagtagttgtttgtaaaaatccaaagcctctttctcaatcaaatcattagtttggaccatagaaccatcataagtaatcaaactccttatcctgttatgggatattctactcttcatactagcatggaaatatgcatagttagagtccactagttgcagccacttcactgttgatttttgtctcaaaatacttttctcaaccaaagaccatttctctaattgtactttaagctccttctcaatgtcaacattttctgcatactgtatagggtccctcattttcatttggatctgaattagttgttgtcttacacttcatcttggcttcaattcccacctaattctcttgtatttaatagctttaaatcttacttcaaaattttcaattttgccaaataccatccatgcctttcttgcttattggtgcattccatgttacctcaacagtggttacagaatcactatgatctgcaagatgatttaggaatttgaaagatttaggtcctttatactcatccacgtcaaatgtaacacacaaaggagaatgatcagacatcccagggtccataacatgtacctccgattgtgatagtctcatcatccaatcactatttgctagggccctatctattttgctaaagatagtaccatttgtccaagtaagctttcttccaacagatttaatctctattaatccaacatcccataagaaattcttaaaataccttatctctacctcttgcgcatgagttttattatgtctatcctctatatccaatactgcattaaaatcacgcatgattaaccaaggccattgttgcaacttctgtaactccagcaagtcctcccaaatagtagcggacacagtattttatgcaagcgggttcaatcttagaagtacataactttagttataaaatagtagtttccaagtgggttcaaataaaatatttatacaaaatttacgctgttttaatcgtaatttatacatatacacagtattatattttggtgaattgggttcagctgaacccgcttagctccatgtgagtccgccactatttccaaaggcttctcctatcttcaactacatgaaagctatatacaactgtaagagaaatatgagtattcacagaagaaagtttgatttcactatgaataaactgagtgcttatcctcatcacagagcaatcaattctactagaatcctacaagagccaaattcttcttctagcacaatacgagtagtttgctctccaatcccatccacatctaccttctttattacctggccaactttattctccttaaacctatgttctaaaatagaaattaacacaaaaggatatttccttataaacaacctcaactcattctgcttgtacaccttgttcaaacctcgaacattaacaatcttcattaatatataggaatattaggatcacttacggtgccaccatagctacattgccccatgcttctgtttaaccaaaaagtataactttcggttgaaactattatatttatgtattaatgggttaaacctagttaatgataatatctctagatgcaaatcctgaaagcgtgtgtaacgttggacagatccaataagaggttggcaataacaaaccttaaatagtcataaagtatgagcaataatggaggagtaactggtaataaatatcaataaatgacatttaagtaaataggaggagtgattcacccaataaagaatatattagatgattgtaccccctgacaataatgagtggcagataaatccaagacagttcgaactattctcggatctgatggaaacgtatgaaataatatgaataaggatcttgataaaaaggtgatgtttgtatcttttctaaaaagagagaatctttttctaaaaaaaatgttcttattagatcaatattacataccatttgtccttctttttcctctttatacgagagtaaacccttttagtacatgtacagaaaatattctttagaatattcactctattgtcctattctaaaaactagccgttacggttcctttcgcggacttcgtccttgactgttataagcatctcgatcacgagcttcgccatctcctgatcgacctcgactgatttttcttcattgctctctcgccctcaaacgaccttgatgagtggactttgttggttatggtcgaggatagtgggtcgggcagttaagcttgaggccagctgacaacgtcgacttttgagatccgtaacttctgggttctatcatttctgctctagaatgacatcacgacatcatgcgtcattatggcgcattttcccaatgctttgcatcgttactcgtgtgactgtcagttggagctgccatttcgattctagtgtttgataatgatggcataatctcttggttttgatacatgaattcctataaatagggatgtgatgacattcatttgttctttacgcgttcctcttatcaaaaccttgtgatttcttcttcgttttccttcgttgtgtgtctttctcctggtggtggtgctttccgtttctcttaatccctcttctgtttttaataaaaatatggttaatttatcctatggttccggtgtggggactaaccttgtccctttggctgtgttatgccttctcaagtcgatggcatctctgtcgccattgaagatgagaactttcctacgatgaagtaaataattcctcatagtgagaaagttagatctgatttttcgaaagaacctgaagaagagcctgaggtttctgagtcatctatgaaagggtacgacctagcagagcttaaggtaaagttcaacgtccctgcccacatcgatttggtcctagcagggcgttatgtggtacaagtccactgccctggttattgcgcgttctatgcatatcctatctaggtcggctacgctcttcctcttctcctattggcggaagaattatgtctctattatggcatgtgaatggcttatcttgccggatatatctacaaacccatcaggatacttactaaattcacggaagtagccggggtcgagatcatactccggcatctgatgcatctattcgcccctaatttctataggggacaatgttgaacttcaccatcgaagaggtcaattcttggtggtgaagatggatgataaggcaagtcttcagttctggaacaacttcttcttcgtcagaaccgaagacgtggtgtttattcttttgttaaaacgtttgaactgtttgctttagtcgtatactctgacatttatcccttgtttgtctagatacgacattcgccccctcctttggtgggggatatttctgagtgggttggtcggattcttcctcacatcacgggaattcgtgagtgaccggactttttcaagaagtttgggcatgctacttccttggtggtgatggtaacatttttcttttttctttttcaccccgaggatcttcaagaaggccgggggctcttcctctcgtgttccgtaagaggaaggatgtctcttatttggcatctatttgtgctttgactgcggcaaaacacgcttgatcatttgcctctaatccttcctcaaacgcggcaaggtcttctcgatcgtcagctccatatgctgcagcctcaacatcggtttcttctcctatgtggatatcttgacagcggagcttctggtttcccctttgtaccgtcaagtggacgaggaggaggagtcgccgagcgacgagagtctgattccccgtaagagaatattggtggaccctggtgatggagttgcccagtacatggactcagcacggtatgattttatcatccgtgagatgacgaccataacactcgaggatgacgtcgaaatgacatctgatgttccgatatcggcagtaggagtcgaagggccatctgctatggcttctgataatttacggcaggagggatcgttgacttcacaactggctaacgatgcttctctgctggccgaggagagagacaaagtcattgccgagaatggctgcgagacgggttctgatatcgatgatgatgagataaggatgattaagaagggctttactcagctggaggtgagactggaggggtccacacagattattgcgatcctcatggattgggatttgctaaaagatactgagattatggttccttcccttggtcccatttgttctgatgtggagagtcgaactcttaaatagatgaaagatgataccttatcaaggagcattgtcggccttgctctcagggtaagacctttgacgcttctattggttatcctcaatagtcaggcgttgtctcactctagtgatcttgtaaattgaaagcgccttaagagaggagcggcctaaggttatttttatgaagttgcggcataaataccgcgagtatcgtggaaagcaccaggaaatttataggtggttttgtgagagcggcaatttccaggctctttgagatgaactgaaggacaagaatgacgatctagtgcgggtcatcaaaaagtggaacgtccttgagggtccactaagaaagaaagaggaagagcttgaggttagcaggggggtcaaagcccagtgcggcgacctccaagcctagatggtttctctgcgtgcctaactagaggaatggaaattcaaagcggatgctctgagtgacgaggtcgcagagaaggcagaggaccttgagaaaactgagtttattcggtcgggggctttgaggaaggagaaagctttggaggtagtgatatgtattctccgttctgagtaagaaattgacttggggattgatgagaggattggggagttggagagagacaactcccttcttcaagaccatgtggtcgccttagaggccgagaaggctcaaatgattgcacacccatcgtcttctcatacttctgattttccaaacgtacccctgggcctgtacgaggaatagattcacgccgaggcccagttggacatgttttgagatttacacgtggtggggtctgttcctaaggatgcccttaaagacgctcgaattaatccccgtgaagctcggatcacttgcggatatgatcctattacgtcggaggccggtgatgatgagatggatgcaaatgtggatcagatagaagaggacgcctggtacgaggacgcgtaccctgagggcggtcatgatggtgagggggttgatggtcaagacgatggcactgatggtcttggtggtgaccaatagtttctttttctttcatttattttgtcgcagacttgtgcattttttgtaggcatctttaaaagcctttgtaaataatcaaagtatgaattaccgactttgttacttgtacccgattctttttcttggttcgtgctcgtatgattttttcgattttcttggccataattgtttagatcgaatgaggttgaacgcatcctaagtttaattgcggtcgagggccatttaggtgttaattcaaacgaggtcaaattcaacctctgttaagttacggtcgagggtcggttaggtgttaactcgagtggggtcgaatataatctatgttgttgtgatcaagggttggtttaagtgttaatttgaacgagaacaaatacaacctaagtttaaatatggccaagggcctgttaggtgttaattgaacgaggtcgaacataacctaagtttaatcacggtcgagggccagttaggttttaatttgaatgagttcgcatataacctatgtttaattatggtcgagggtcagttaggtgttaattcgaatgaggtcgaacacaacctatgtttaatcatgactggggcgagtgaggtgttagttcgaatgaggtcgaatataacctaagttaatcatgtccgagggccagttaggtgttaatttgaacgaggtcgaaaataacctaagtttaatcatggtcgagggccagttaggtgttaattcgaacaaggtcgaatataacctaagtttaatcatggtcgagggcaagttaggttttaatttgaacgagatcaagtataacttatgtttaatcatgactgggggccagttaggtgttaattcgaacgaggtcaaatataacctatgtttagttgcatatgtttctaggtgcggcatttgtcgacgttgtgaactttaaggcacattgctttggtcgtatatccggagaaatagaaataaacttcatgcatttgtgctttgttcgtacatttggagaaatttacatctttattcgagcgttggttggcgttccagtcccagtttatctagtcccttctttggccggtctggagagatcttgagaggtcgggcaatgaaatagtcgtcacgtgcctccgtccgtgcgtacttcgacctgaagtgtccctttcgtcgcctcgttaaaaacctccttgagaaaacccaattaggaaaaaactcaagtgagggaaaagagtgtacgacttggaggacactttgtctcttaacaattgaagtacttgaggtgggtaatgttccagttgtttggtattagctttccttccactgtttctagttgggatgacccttcgttcgttgttgccaagattttgtatgggccatcctaatttgttcccagtttaccttcccgtgggtctttgattgcttgtgttttatctttatgcacataatcgctgactttgagcggcctgacctttgcctttttcttataataacattctacttgttgttttttgggcgatcatcattatgtaggccatatctctccgttcttcgacgtcgtcgagctcctgctttctgctttcatcattccttggtccgctctcgtgggagtatcttagactggactccccgactttgaccggtattactgcgtctgtcccatagactaataaggtgtctctcctgtgcttatcttcggcgttgtttggcaggtccatagtacttctcataatatttctatccacaaccctttggcgttttcaagttttttctttgtgatgttcagtatcggcttattggaggactccgcttgtctgttgcccgcgggatgatatggagttgagagtattatttcgatatgccattttattaataattcagcgactttatttccagtaaattagagtcgttgtcgtagttgatctctttggggaggccgaattggcatatgatgtccatacgaaggcgatcacttcctgttctcgtatttgggtgaatgatcttgcttctacctatttagtgaaatagtcagtcaaaaccaaaaggaatcgtatgttacttcgtccttacgggagggggactacgatgtccattccccatttgatgaaaggccaagggaaagtggctgagtgaaggtgttcgcctgcttggtgaatcattggggcatacttttggcattgctcgcattttttcacgaagtctgcagcctctttcttcatggtgggtcggtacccttaccgtataaggcatctaaccaaagcatgattgctggaataagctctaaatggtcttcgtggacgtctttaaaaatgcgccgcgtctgatttgggcccaagaattttgctagaggatagtcgtacgttatcttatacaggtcgttatggatgatgctatatctggcgacttgcattctcattttcttggcttcatttttatcacctgggagtacaccattctacaaatatgtgacaatacggttgcgccactcccaagtcaagtttatggttcttacctcgattaggtctatcgatgagttaagaaggtggactatacttctgtctccggttgcaatgtttttggcggttacggctaacttggtgatgtcgtctgcctcggtaatctgtgttcgggggatttggtcacgttgacattcgtctaactcggacagcaacttgtagatttcgatctagtacttttgcaacctttgttcttgatttggaatgttcctgtgacttggttgacaacgaattgggaatctagttttagccgcttcgccctgtatttgagtgctagtatcaacccggtaattacggcctcattgttagtcatgcacatgcacctaatggactggaaaatcactttgctggttgggaccttgagtacgagtcccggccagaccctgacgcgttggacgcgccgtcaatatacaggaacagaggtcttgtgtttggggagaagcgtggacgacttctttttcgacttcaagcattatttttgcgatgaagtcggcgatgaagtccgcaagaacttgtgaatttatcgttgttcgcggctaatatgtgatatcatgctcgctcagttcgatggcccatttgtccaacttgcccaatagctcgggtttgtgtaaaatgcttcttagggggaaagttgagacgaccaagatggggtggaatatgaaatgtggtctaagctttcttgaagctatgactaaggctatagccagtatttcgaggtgaaggtatctcgtctcgacctcgactagtgttttgctaatgtaatagatgggagattgcgtacctttattttctcgggccaagactgcgctcacaactaattctgatacggctaggtagacgaggagacattcagttgtatttggttttgaaagtaatgtctgtgatgacaaatatgcttttaattccttcagcgcttggatgcactcagaagtccactggatgcgtttgtccttcttaagcacgctgaagaatctgtggcacttatctgatgatcgcgagataaaccttgaaagggcgtcgatacaaccagttaacctctgaacctgtcttttggtggtgaggtgttatggtattccttcgatggctctgatttggtcaggattgacctcgatcccacactgtgacaccaggaaacctaaaccttttccaaaggccacgccgaatgcacactttttggggttccgtttcattatgtaccgtctgagtatgtcgaagttctctcttaggtggtagatgtgatcctctttccttttgtacttgaccaacatatcgtctatatataccttcatcttttttccaagttggtctttgaacatcttcatcactaacctttggtaagttgcccctgcgtttttcaacccaaagggcatgaccctgtagaagtacgtcccctgatgggtgatgaaagtggttttttcatgatccttttcttccataaggatttaattatagcccgagtaggcgtccaagaaactcagtagttcatgcccgtccgtcgatgagttggtcaatatgcggtaacagaaagtctacacatcctccatttccaattcttctttttcaccatgaccacgttggtgacccattgaggggtatttcgactccctgattgagccattttccaataatttttctacttcttcgcatatcgcgtcattaattgtggagttgaacttacgcttaacatacctcaccggggatggaatgtatcgacgttcaacttgtgcgtggcaatttcctttgggatacatggcatatctgcatggctgaaagtgaagaaatccacgttatcagttaagaattgacaaattttacctggttcctgaagcttgtagccgatgtaaaatttcttgtagtggtcgttgttgtctaattgaatagggtaaaggtcttctaccgtcgatcatgcggcttcgattgtatcggggtctctaaggatgttttcgctatcatcgcgcaccgaccctgttgattgttatgccttttttttatttgtccttcgtttgctgagtgaccgtgcagtctggagagatgcggtatcattcccgggatatgcgttgttctcctcgtatactgaatattccccatgggattgggaatatgatgacttgatgcaagctggagggacgactctcatggagtgtatccatggccgccctattatggtgttgtatgttgtatcctagtccatgatatggaacgtaattccagagtgacgccaccgcccaggacgggcaatgtgatctcgtcggatgttcgttccattgcattgttaaaacccgttagcgtgatgcagcgcgacattatcttatcctcgagtttcaattgtgcaagtactcaagggtggataatgcatgttccgctcccatcgtctaccataatgcggacaatggtatctacaatttgtaaagtgataacaagagcatcatagtgagggaagactaaatcgttggtatctgacttatcaaaaatgatactttcttcgagttcatcatacagttcgtgggtgatcgaccgtttgatcttgttagttgtgttaaacttcacacttttgctggaagcatcgtcaccgccaccgatgatcataaggatggcgagggtggtttcggcggtccttgaagttgttcacgacctctggaaaaagttgatccttcctcggtcgctcagcaactctttgaggttccttgtcttagcatgtttacgacttcctgtcttagagcgatgcaatccttatttttgtgccctcgcacttggtggaactcgcatagggcgtccgactttctggtactcgggtccaacctcatttttttcgcccatttcacctttggtccaagcttctccaaggtgtagactatttctgtaggtaacacacaaaaattgtgaacagacaataaatgaggcatacctcttttgtttcggtgaatccctgttcttgatcggggtgggttctcttcatggcggtagggggcgcaatggcaattttggacaaacggtagatgtcgttccatgttgggtcgcagagctgcgaggtcccttctgatatcacttcttcgatctttactggattctacttgtaccgaggtcagtctatgagtcatcccattgaggtcatcctcgtcttctaggacctcagcacaatacgcattgtgtatttcatcccaagtagttgggggtacttcataatccgacttaataactttctcgttgcccttgaaccatttctgctcagcccgttctgaaaagctgcgaccgccattccttccgatacatttggcaaggtcattcttactcggttgagacgggcgagtaagtccctcggtccctctttcggggattgtataatagaaaatatgtcgttaaagagccctcattgatgatatccatgaggttggttgggagtttactcgttattctcgttctttcttctttgttacctgtcatattagatcggtgtacaaaacgaaaaagggatcttgttcttgttttctctttttttttatgttagtgattcgtgttagttatagatctagaggaaactaaaaatttaactagggaattcccacagacggcgccaaattgtttgaccaaaaagtataactttcggttgaaactattatgtttatgtaataatgggttaagcctagttaatgataatatccctagatgcaaatcctgaaagcgtgtataaggtgggacaaatccaataagaggttgacaataacaaggattaaatattcataatatatgagcaatattggaagactaactggtaataaatagcaataaatggcatttaagtaaataagatgagaggttcacacaataaagaatggattagatgattgtttcccctaataataatgagtgacagataaatccaatacagttcgaagtattctaagatctgatggaaaagtatggaataatatgaaaaaggatcttgataaaaaggtgatgtttgtatcttttccagagagagagaatctttttccggaaaaatgttcttatcagatcaatattacataccctttgtccttatcttttttctcctaacatgaaacacgcccctagtaaaccctaataatacatgtgttggtctttaagcttaatgtagcttaattgtaagcttagtgtagcttaattttaagcttggtgtaacttaaagagagtgaatggtggtgggaaaataaatggagggaagtgacattttgaattagtgcactttgtccctcattggaagaaggaaagaaaatctatgtatatatatagagaagctcttaaagagttgagaagaaggcaagcctcgcgccgccgtcgtcgtcgctcgctcggctcggcttcggcttcggatttggatttggtcaaagatcaattgattgattaattcagaataacccgcgacccggtccggtccgttttttctttccccgattattttaaatctgtttttaattttcctgcaatattcacacctattccaaaagctatggttgttctaaaagtattcacacctgttccaacagctatggctgttctgaaaggttgcaaaatcttttcagaaacagtacgaaaattggctatcaccagagttttaggtaccgatatgttggtgagttaaatcgttctatcctgggaggatatattccaaaacctcgggtacttgagggaataatttccttaaggacacattgacgttctaagttctactaactttctgtttctgtatttttcaaagagtttactattttatttattttacagcaatacagattaataataatcttaaggaaattaaatttattatattctactccttctgaattttattattctaatttgaagatataaaaacttcagtagagttttgaaattcagaaaacgatttgaagaacataaaagcttcatcgttttctgtgaaacagtatatataaaaccttctgtttttgtttattatacatactgtttattgataattatagtattgtttactattttgtttttccattaattgaactcttctgttattgacagtgagaaatggcaattgataacagaaattcttctgcgactgttgcggcaacgacgatagcctcgtcaagccggactgttgttccaccggcagaaaccggggaaattttctggagccaacttcaatggatggaggcaaagggtgttcttttggcttaccacacttcgtatgcaaaaaatcactagtgaagagcctcaagtgcctgctgcggacatgccggacagtgaaaaattcatgattgttgaggcgtggaagcatgcagattttctttgcaaaggctatattttaagtgctttagaggatgacttgtacaatgtgtacagtgcgatgaatacttcaaaagaattatgggacgcacttgagaagaagtacaagacataagatgcatgcttgaagaagttcgtggttgccaagtttctagactataaaaagatagacaacaaaactgtgggaacccaagttcaggaacttcaacttatttttcacgaccttattgctgaagatatggtcatgaatgaagcatttcaaatggctgcaatgattgaaaagttgcctccttcatggagatatttcaagaactatctcaagcacaagcgcaaagaaatgaagttggaagatcttgtgattcatctcaaaattgaggaagacaacaaaacagaagagaagaagtctcctggaaattcaaatatcatgggagctaatatcgttgaggagactgctccaattgtggaagactaaggagcagaacaaaaagaaattcaaaggcaactgccacaattgtggaagagttggtcacaaagcccctgattgtcgtctcccgaaaaaggataagaagaagggacaggccaacatagtggagaagaatgatgacattaatgatctttgtgcaatgctttcggaatgcagcttagttggaaatacgaaggagtggtggattgactccagagacactcgacatatttgtgctgtcaaaaaaacatttgcgacttactctactgttggtcccgaagaagagatttccatgggaaataattcaacagccaagattgaaggttatgggaatatattcctaaagatgacttccggcaaggtgttaacgctcaacaacgttcttcatgttcctactattaggaagaatttagtttctacttctttacttgtgaagaatggattcaaatgtgtatttgtttctgataaagttgttgtaagaaagaatgaaatgtatgttggaaaaggctacctcacggagggccttttcaaactaaatgtaatggttgttgacagtatgaataaaatttcagcttcttcttatttgttggagtcaaatgatttatggcatattcgtttaggacatgtcaattataaaaccttgcggaagttaattaatttagaagtattgcctaaattcgagtgtaataaatcgaaatgtcaaatatgtgttgaatctaagtttgtaaaacatccttataagttcgttgaaaggaattcaaatcctttagacttaattcatactgatatttgcgatatgaagtcgacaccatatcgaagtggaaaaaagtatcttattacttttattgacgattgcactcgatattgttatgtttatttgcttaatagtaaggatgacgcaattgaagcatttaagcaatacaagaatgaagtggagaatcaattgaataaaaagatcaaaatgattagaagtgatagaggttgagaatatgaatctccgtttgcagaaatatgttcggaatatggaattattcatcaaactactgcactttacacacctcaatccaacagaattgcggaaaggaaaaatcgtacattaaaggaaatgatgaattctttattaataagttctggattaccgcagagtttatggggggaagctatccttacagctaaccgaatactcaacagagaaccccacagcaaaacgcaatctattccatatgaaaaatagaaaggaagaaaacccaacttgaaatatttcaaagtgtaggggtgtctagcaaaggtacaagttcctttacctaaaagggttaaaataggaccaaaaatagtagattgcgtttttcattggatatgctacaaacagtaaagtatgtcggtttttggtccataaatctgatagtcccgagattcatgttaatacggtaatggaatcagataatgttgaattctttgaaagcatttatccgtataaaactgaatgcgagtcgttaagtgaaagacctaaacgacctcgggaagaaccaaaggaaaattctccaagtgtagaagatccaaggcgtagcaaacgtcaaagaacatctacttcctttggaccagattttgtgacattcttgcttgaaaatgaacctcaaaattttaaagcagctatgtcatcttctgattcagcgttttggaaagaggcagtcaatagtgagattcaatcaattttggataactatacatgaaaattggttgatcttcctcctggaaataagcccttaggttcaaaatggatctttaaacggaaaatgaaagctgatggcactattgacaaatataaggcaagacttgttgtcaaaggttataggcaaaaggaaggccttgattactttgaaacttactcgccagtaacgaggataacatctataaggatgttagtggcattagcgctcgtgtatggtcttgaaatccatcaaatggatattaaaacagctttcttaaatgaagaattggagaaagagatttacatggaacaacctgagggttttgtggttcctagtaaagaaaagaaagtgtgaaaacttgttaagtcgctttatggacttaaacaagcacccaaacaacggcatgctaaatttgaccaaacaatgttggcaagtgggtttaaaatcagcgagtgcgacaaatgtgtttacattaaaaacactccaggtcatgaagtcattgtttgtttatatgttgatgacatgttgataatgagcaaaagtatggcagatataaatgctacaaagcgcatgttggctagcaaatttgacataaaagacttaggagttgctgatgtgatcttaggaatcagaattcacaagacttcacaaggtctagcattctcacaatctcactacatagaaaaagtacttgacaagttcaagtatttggatttcaaaattgccaagactccaattaacgtgagttatgcacttcaaaagaatgaaggtgaaagtgactcacaactggactatgcaagagtattgcgaagtttgatgtatatcatgaattgtacgcgaccggatatagcatgtgctattagcaaactgagtcggtttacaagtaatcccaatcatatacattggatgcaatgaaacgagttttggggtatctgaaacatacccaaaatatgagttgaattacaacaaatatccctccgtgatcgagggatatagtgatgcaaattggatcaccggatcatctgaagttaaatccacgggtggatatgttttcacaattgcgggtggagcagtgtcatggaaatcatccaaacaaagctttagataaggccagtgaagaagctgaatggctcctgaatttcttggaagatattcccttttggcccaaacctttggcacctatttatatacattgtgatagttaagcggcaataggcaggggagtgtaatgtataacggaaaatctcgtcatatacgacggagacataataccattataaaactactctctagtggtgttatcacaattgactacgtaaattcaagagataacgtgtcagatccacttacaaaaggcctatctagagaggcagttgaaagatcatcaaagggaatgggttaaggcctaggacaagtcatcatggtggtaactctacccagcagactggagatcccaagagctaggttcaaagagatcaaacaaatttatgaatgacggttcaacattgccaaataactcaacccattctcgtgatgaagacaatgttcaaaatcaaggtaaagcattaaggcttttttatgagtcaataaagcttaaagctttttaatgatttgctaagtctggcaggatatgaccagatagtatgtctttaggattacacgtttaggaatcacctatgtgagtgtgaagtgtaagccgcttcaagggaaatgaaagtaaaggcccattctctaagcactcatgaaatcgggcggtgttcatgactgaaacgaacacaaccgtgagaaccatagatggttaaggattgattgcgtgacttatgttgtctaggtatacaacaaagctcgacggttcaaagatatcaaatctaccgattgaccgagtacatccgatataagttcactacggaaagttcaaaggtaaacctacttatccagatgcaattaattcttgcatgtaaaacacacacacacgtctgtgcattcctttactttatagtcattccccattcatttgggggattgttggtctttaagcttagtgtagcttaattttaagcttactgtagcttaaatttaagcttggtgtagcttaaagagagtgaatgaaaaatggtgggaaaagaaatggatggaagtgaaattttgaattagtgcattttgtccctcattggaagaaggaaagaaaatctatgtgtatatatagagaagctcttcttctagctcttaaagagttgagaagaaggcaagccctgcgtcgtcgccgtcgccgctcgctcggctcagcttcgccttcggattcggattcggattcggtcaaagatcgattgattgattaatctttttggacaaaattcctttcaaattatttaattaattaacgaaaattcaatccggaataacctatgatccgcgacccggtccggtccggtttgttttttctttcccgaattattttaaatccgtttttaattttcccgcaatattcacacttgttccaacagctatggttgttggtcccgtccggtttgttttttctttctcgaattattttaaatccgtttttaatttttccgcaatattcacacttgttccaacagttatggctgttctgaaaggattcacacttgttccaacaactatggttgttttgaaaggttgcaaaaccttttcagaaacagtacgaaattggctatcacctgagttttaggtaccgatacgctggtgagttaaatcgttctatcttgggaggatatattccaaaacatcgggtacttgaggggaataatttccttaaggacacactgtgtattcagtgggctcgatttattcctatattattttaaagaatttatgttgacgttttaagttctactaactttttatttctgtatttttcagaaagtttactgttttatttattttacagcaatacaaattaataacatgttcagcacatattctttagaatattccctatattgtcctattctaaaaactagccgttacggttccttctgtcctctgtttttataagcatcccgaccacgagcttcgccatctcctgatcgacctcggttgatttttcctcaatgcttactcgcacgattccgtagtagatttcgacccacacagcttcctccttcaacaataatagaagttaaatgctagccaccactagttgttaatggtgtaaaaacattagtaacattaacaggttttgtccttgggatttcaatctgggttgtcttcgagactgatcttcctctagcttctatccaaggatctctcctagattccgacctcctgggtttctcctacattttgctgctgctcttgctgagccttctcatgcatttgcttgtccaccacatgctttgtaacaacatctttaggaccctgcctaaaatattcttgtttccgtcttgtattattttgtttaagtccttacttgagtttataaacatgctatacctcattcctatcatcaattcttttgagtgggacagcaaaatttcattgagatgctataaacctctctagagccccaatggtacgcaggacatgttaggacatgttaggggttgtcatgattttgtaatcatatttggttttcctatttctagaaggaaaggacaacatattatcgtaattgggtttttcttggctagtcctttttgttgtaggaaaaagtttgaacttctataaattaaggatccttccttctcatttagtagcatccacaatgtagccatatggggtttgagagtcgtgtataggggaagaactttacgggacaagtgttagtgtgtcacttgtgtttgccttttcgtgtggttgttctctcaatatttttgtactctcttttctatagtggattgctcatctccattgtggacgtatgtcagctaaccgaaccacgttaaatgtttgtgtctcatttggtagatttctcttttgttgtctgatttatcgttgtcaaagtttgccttactaacttccgcatgatacttgcctttttcggtcgtaacaggagagtccacagtcttccatttatttgtttccctttccacatcctctcaatccaattcaacaattttcggagcgacaaaactttggcacatgtattttacacgcatgtatatatgaatatacacgcatggatacagatgagatacatatgatatatacaagagaaacatgaaaggtacgttattatacatgcataaatttcatcttcttcctttcagttgtagctcaaattgtaataaaaaggttttatagactaataaatattcgtagcattttatgagttgggctaacattcggattttttttcccgcttcgggctgccatattaaggagcaagtgtacaaataatcattctcaaggatgttatttagagattagccagtaactgaataattgaaatttaagacgcactgactaatttctaaatagcagcactttaaagtggttacctggtgtcatttctatttaggtagttttcttgacatttcgatgggacgatagtccagaatggtggcttatttgtacgtcaaaataaacgggctaccaagtttttagactgttaattatgaaatagtcagcatttgcaaaatcattgaaaaatagttattattgtatgcgaagataaaatctggtaaaaaatacccttgccgaaacacgaaacctattttctttttaatccttgtaaaagaaaaagacccctttctatatttggaaagaatttatttttacgcaatgatttatagccgcatatatgtacctcattttataccacaaattcaaaagattatttataagaggagggtaaggatgatgatgaaactgctgcacaacctatttgaccttttaatcttgataatgctcagactcagataacaattgccttctttttaaaaaaaaaatggtaaagattatagttaatgcaacactaagaatgtgctgaaaaatattgtacaatgtggcaaggtgcaaaaaatttattttgcaccagaaataacctctgttttaaaaggttgaattgggactcgctcggggctagcccctgggtggagcactagtaaaacgctcctgggcttatgtgtggggcttagttctgtgagacttacgccttggccgtcggtgcttacgccccggacgtgcccaacacccagcgtactggacttgcctaataaaactttatgcaattgtgtgtaactaaactaaccttgtaaatctttaaaaaaaattaataaattgttgactatttaaaattacttttttcttaatcattaatcattaagttgagagtattttatgtcataattaaaaaaaatatatcgcatgttatccactaagactgctatgatagtaattttaaataaatcttcatttaaaagtatttatttgttaacttttgttatgtatatattatataatagtccataatttttttagaattattttcctaaatattaattttttcatgtttatgagatacaatacttattaatttaatagcccaatattagctcgtaactatttataaataattagtttcatggtacaatatggtgaattatgtgtcactttattaacttgttgaaacttaaaaataagtgatgctacagaatcatatttaaattgtgaattatgtttctatataaattctctttcaaatagtattaaataaaaggtgtatttaaaaaaatatcaacttaatatcgaaattatttcaagattcattactccttaaaagatacatataagaattctcatcgaatacattacatttgatgattgagtcataacaacacagctaatttgtatattatgatatatgtcatacttttcgtattattcttagttgaattataatttataaatattttgaataaattattttttataattagcatttatcttttgaatggagtccatttaatacctaataagttccaaaaaaaaaactggtgactgcttttcccttaaccataagttttggtttcgagctttgagtaaggaaatttcttgttagggaatgctttccccggaatgggactctacgcggcgcaaacccaaatataatcgggcttcaacgggtaccgaacacctagaaaaccagaaaaaaaagatggacaatgaagataaagatgattactggtttctgcttgtgtacatgattagcctctttttcgtagcttgttttgtattagaacttcttcctaaaccatctcctaatttggagtaactctggccttagcttgttaaagttcttctaagtagtgatcacaaacgtggttcttgtcatttttgtgcaccatacttgagatcgattcccttcactagcaacctcctccgtcaagagctcgttttgccatgcatacctagtacgatttacatctcctatgtgatttgcgagctattgcacagtgagcaggtcactagtgcacgacaatatttttgagaaatcctcgcaacatattcatgctgggagttgagcaaaaagcaaactcataaagaaacaagtgcataattttcagcataccaagatcctagaaattatcataaccacaaaatatgtccaaacatgagtcattgccagctaaacccccaaacaaacagaggtacattatccaaaatagcttaagtagcaggtaccctaaagccaaaaaatgtcatggggatttcaacaaggtcctaggagttttaaaccgaaactattcacaaacaaccaaacatctattaaccacacagctagcaggaggctagtaacaaagcatcaacagaagaacatggaactggaaactttttcctctagcttcgggagctggggcacagcaaccggaccagcatttgtaactcccccatggcttgaggacgtctctgatgtatcttcaaacttcatccactgtcccatctgagtggcagccagatgagcgtaacagatgggagcaactgcatatggacaaacaatgagtgcaaatagaaaaacaaagagagaagtcgtagatttatgaaacacgataaagttcttgatcagggaaacatattaggcactactgttcttcgccaacagaatgacacttaccaacagatattgcggttgtgctcctttggtagctgcaaggatgatgcaaaaaattgttaaatatagcaacattagacaatagattattgatataaaacaaacggatgctgtgaatttacaactcggatatacttgatacagtacttacacataggataaattatgaacaagctcttgaagatcatcaggtgagaaaccaatttcatcatacaagacatggtagtgtgtaggacgagtggtaccctaccaaataatcatagtccaaataagaatcattagatatcaccggacctgaacttagttgggattgaagcacagttgactgtttgaatgtaaatgattcaccaacattcagcaaataagccactagttaagctttgaaatataattgaacacaaatttgtttcaagcatatcattagaggcatgaatatccaaaagaagaagaaatgcagaattctctagataaaaagcaatctgccaatgcaaccaaaaggtggagaaatcgatatcaatttaaagccctccatcccccccccccaaccccccaaacacacacacacacacagaaataaaaaaaattacagtaacgatgcagataatgtaatacagctgatccaaagtcacacaccaaaatctagcatcttcttgactgagatcacagtccaaaccataaaaaattcaatggtgattatttcatagagcatggctatcagctagcatgagatgtggaaatatgactgacgtttcttgtttcattctttcccttttccctttgatagaaacaatctaatgtttccgaaaatacaagcttacaaactaccttttgtattagatttaagtctgctgcttgagccatcctaattagcaatgaactgagctccaaacagagactagataaaggacttaacaagcaaaccacataatacacaagtgattgagcaagaaaactttcatgaggttagttgataatacaatgcaataactaaggacaaccagaagcttttcccagccctatctaatataaaacctcaataatttttcaacttattgggattatactgggtatgttgttgttgtatacttgggggaagaccagacaacacattcagtattcattgtagaggataaacaccttaaacacaaaacaataatagctgagaacaagctaagaatcaaaagaagaaaattcaagtatgaaataccaaaactattagactgaaaagagggacagaaaagaaaactaagagaacataagacttacaatcattccagcatgggcgcacaagtagaaatcatagtttcttgggtgacaaactttattgtcgataattgtgcctacacaaacgtgaatgtgtaagcaatttcctacagcgcattagttgcaattattattatagggactttgagttgtacctggaggaacattgttaggatctccaggctggaaaaacttggtatgatgattcttctgtgcgattatcacagtaaacttgggtgaccacttctcgtcgagaaatttacacgcctattaatcaacaaacaaaacaactgacttagtacaattatatctcgtttccacgagtagagatcactattcctcaaaatagcatttatgagactaaacctcgatgatctgatccagttcaatgttcagaacttgattaaattgagattcactgacaccgtccctgaaagttttgaacaagaccataaataaaacaatgattatagaatctacacatgtacaaagtcagaaccacatgtagtaccacagcatgacctgcagatcaagacttccatctcaggaaaaagtcaaaaatcgagtatcaagataacttaaacggccatcaaggaaatgccatatataagtaactttaattgatgacaacccaatttcaactaagaagcattataaactaacattaaggccacaacctaacaactgttatatgcagttttcttcagatgaggctatagttaacacctcgagtacctggaaagttctttttttaaacctttttactttgacattattatttgtgcacatctggggtcattgactttgattccactttcatttcaggtcagtgcaaatgtttgagcatttacacacactatagcagcacttgtacagcacacatttagctggaactaaagagaataaatgcgaaaggtcacctgaatataataatatgctcaggcttccttttcccagaactcacataaaaatcaagcaaagcctccctgcaattttgtagaataattatttagatgctacaatagagtagataattccaaaccgagatcctacttatcatggtagagacccaaaagaaaaaactggtgagcacaatagaagtgcaacaagcttagcattgctatatcatgtaggtttatgtaggcaccaattaaagccccaagcaccaccatccccccacccccagaaaaacaaaagagaatggtaaacctgaaaaagcaaactcacctcattatcccctcatcctcagtctcagaagcacgtttaaacaagttgtctatcatctccactttaggagactgagtgcgcactgaagctctgtaacgagatatcgaaggccactgccttgagctgacaacctggtcacgttaaagatgaacacacaataagagaaatgcaacatgtttccctctatgcgcttgtacacattaggtgactgaattttgaaggaccaattcaaggaaataatcatagatctggttggttaaaaaggaaacaaaatatgattcaatgaaaattgacagagatcataccgcagcaatggatggcacatcagattggccaggagagccatgtgacacatccatcccaagaattatggtgggaaccttagataccatagggatggcgggagcatgttcaacagttaacatagaattcaaaccaccaagctgccaagaaggaataacatgattaggaaaatattttgaaatttcaaagaagcaaggaaaggtggaaaaaaagaagatgctcagggtgatatcacagaaccagatgctcggaactctcacctttgcatttatcttcagaagcacattggtgatatactggtcattgactctcgttggagctatgcattgggtaacaatgccgaattcagccaaattcttccgcttccatggtccttcgagttcaatcagttcaataatatcagtcatcatcagcagttaagagttgattgttaagggaacaagtaaatctcactaaccataaatgtcacagttcttcctctcaggaagcaaacaaagcagaaatttcggtgccccaggaagttttgactggacttcttcaaacattttttccaccctgacaagcggtggagcccttctgaattgtggagactcttcaaaaacatcaaatggatcttccaccatctgaacacgttttataaaataaggaacaatgatcaggtcattcatctttacactcactttccaagtaactacgaatttgagggaacttacaattcctttcattttcccacattttataatatcactgattagcccctgtatgttacaacgtgcagaaaagttgacaacagcccagcgctctatctttgtaggatcaaccagtctctgcccattcagcataaaatatgaataagaaattcaatggacatcaaaactaaagaaattatgaggataaattaaccgatcaagagaaaaaacatttcaaacggagaggttctataccttgttattgaaattccacctgccattacgtggaacaaagtcatcaccacctgtcttcaactgaaatgcataaaggataaggtcagactggatttccaaattcactaaacgatctaatcagccaagaagtgattataaattatatacctttgggggagaaagaacacgcccttcaacctgggtgaagttactgctgattgaaattccacaggcactaagcagaggctcggcatcatatttgttgattttgagggcctgcaccaaaacaggaattagtgcctatccaccggaatactccaagggattcctttaaataacaaaaacctacattgcttaggacttgcatcctctcctgaggcttttgcctagatttctccactaatgaagatctctggaatgtggacagagattttgtatacctttgcaatgacaccaaattgcagagctgcatccaacaaagagaaactgagaatattatatgcacaaaacacaagttatgacataggcctttaatattaaccaaggctttttacctcgatagggaaataggtgggacgtttgggtttcccaacattgatgcagggcaaatcagcagaatagcgcaagtctatgtttcggtgattgacaaagtagtcataaacagtaatttcatcaccttccccatctttacctttctgcttcagggtaaacctaaaatgtcaaaagaagccaagtttacaacttaatcatgctaatgtttaaataaaaagaaataacaaaaaaaagaaataacaaaagaaacaaaggcatacgcttctttaaataacaagaaataacaaaggaaagaaaggcatacgtttgctcacgacacggtctgtcactcagtccagtaatcttgtactcttgattagttggactagtcttcaccctcaaattcttgagggtacgttttgcctaatacattgtgtagacaatccgtgcttagctatagtttacataactagataaacagattaccacaaacaacagtctacctttgcccaatccagcgtaaagggatcttttgcattttgatttgctatcaaaaagtccactacaggcccaggctggataatcattgtggttgaaacatctgtaattgacgcagtagtacagcattaaactcatttcgttcgagtagaagtaagaaacatgaaacttgagttattagagtcattaccgatgttcaaagacaagccactctgagtggtcctaaagctagaatggaatcctcgacaaccaagaacaccacctccaacatcaacaaagttcttcgggtcattgtggaaaaaggactgacgaacaagtagacagcccctgatacaagaacatcaaccaaatgaattgagaaaacagacagatgcaatcaacccctctcacaaaaagaaataaagataacttactgcttagcagcatgctgccttaaaattatatccaacactctcaaggcttcttgagagttctcagactcttgacctcgcaaagcatttgcaattgcctgcatcggaattttcgcggcatagcttatctccaccttaaaagattttgattggtaaggacgccgtaaccttttcctgtcactttcattgggactttcatgtgcagcagggctgctattgccattgttcctgaatgtaaaaaagttgtgaacaacaaagagtcaataaccgctatataaggcattggaaacaagcgaggctcagccattttgaaaaccaacctatttgatgtgacgtcttcaagaacaacggtgaactccattttatttcgagggagtgctccaatggtgaacaagcttttttccccgtcataagcaaaatcttttccagctagttctgtatcatatgtttcatgcactctatctaggacctttctgccaactcccttcccatctactggccgcccatcttcataaaatagggcaacctgtaaaagaacagagttaacaaggtcagggaattattagactaaagaaaacaaaaaatagaagacataaaaatatatagtggagagagacacatacactgtagtgatagaagtgtccatccacattggtcacattcactttaaagtgattggtgagaatttgaatcttttgtcccttgtttccaaggccacgtctggccatgggaagacgtagagcagcctttttcttcaccggttcgggttccgatgttgcaggagtgaaatcgggtggaacagggggaggaggtggcagaccctctgctgctccattcttatcttcttcagccatatcagaatcctatatgaagcagagtttctgaatattagaaaacaggaaattgaaatgcaactgaaataccatacaaatatgtattctggggagaaggtggagtagtgagaaaaatcaggaaagagagtaaattcagacaatctcctacaaaagccaccagccaatagatctgctatggtgctaccaaaccataaggcgagagaaaagacatgtcagaattcaggaaggtctaccaaaccataaggcagagagaaaagatatgtcagaattcaggaaggtctaccactcttcatgggaagaccttaaagagtgttaataagaactgaaaatgacaaatccagaataaaataggcatttgggtaatctggacaagttgtttgactgaaaacatcaaaaagaactaaaaatctcagcagctaccaataagtgaggtcatcaaaaccaagcaagacgcaaggcattcacaaaacaaattgtcattcagaagcacgtcagcaaaatatacggtgaaggtaatcattctatttcacccaaagaaaaaaaggaatcactaagaccagacaaagcactcccttaccatatttggaaagaacaaagaaacaacagcagcatagttcatttctcaaaatctcttctagttttgatttttttctttttctttttctttttgtcagaggaggaaatccatggtacagacatgatgaaagcagaaaaactacaccaattacaattcttactaacgacttcaacctaaagaaagaaaatgcacaatgaatgggcaaatactgataagagctacaaaaacaaaacgccttttttgaccgagcaaaatgaaagcaggtcattgcggtaacactaaataagctgctcattctatttcagcctgcgggttttaagctaataaacaagaagaccaaaatctcgaagaaagaatagaccaaagcacagtgcactgtaaaataactaggtaataacatcaatgacagagtctaaataaagaagaagattgctgagtagaaaatgcagaaattcacaaaaaaaacagcacaggtactattgggaaaatgtcaaactccacaaagcaatccataatacacacatgcaaactaagaaaatcagaaaaagaaagaaaaacaagtcaaacagatctcactaactccaaaaaaaacttgaaatttttcatttgaaatgctcggaccaaaatcaaaccaacctcagaaactactcaaccacagtagcagaagcacaagaaaaggtccaaactccataaatgaagcaataacacacacatgcaagccaagtaaccacaagaaaaaaaagataagaaaaccctgacattacacttaaaacctacttttttctctttttttctctcacgctcaaaacctacttttctttttccttttttttctttcttcataagtttctgagcctttgaaaaaactatattgaagcatttaaggagaaatacaaaaatcacagagagctttcgtcagaaacactacaaataataaaatcagacaaccattgtaaaccacaataccacagacatgcaaaccaaaaaggacagacaaaaaaatgacaatttcacactgaaaatcattttcttttgttctgtcattttcagtttctggggtttaagttttaacaaatgcaaacccatgtttcagcataaacagtataaaataaataaataaacaaaccccagaaaatattgaatcaaaatcactcagaacaataattttgtttttattgttgacttcagttttagctcttgaaaaaaaaaatcagtagaaatacaaaaatcccagaaatgtttttagccccataacttacatgcaatccaagaaactccaaaggaagaaagaacagactaagaaaaactaaaatcaaaatttttatttttattttatttttattttctgttctttgactttgccagtttccaggttttaccaaaagaaacagaagaaaaacacacaaaaaaaaacccagaaaataattcaaccacaaatcactcaaagtaaagcagcattagcacaaatatacttcaaaaatgcatcagaattttccacagtgattttcttccatagaaacagtaaaaaagaaaaaataaaccaaccccagaaaatattataccaaaatcacaaaaatacaacagctttgactgattcagaagcagaaaaaacagaccaaatatacttcaaaaagcattaaaaaaatccataaatattttataaaagtaaaaccattttttaggcaaaaataaacaaaccccagaaaatattaaaccaaaatcagtaaacatgcagcaacattgactaattcaaaaacagaaaaacacacaaaatatacttcaaaaagcatccaaaaaattccataaaaatgttataaaagtaaaaccattttttagacacaaataaacaaaccccagaaaatattaaaccgaaatcagtaaaaatacagcagcattgaatgtttcaaaggctgaaaaacacacaaaaatttacttcaaaaagcatcaaaaaaatccataaaaaaaatttaaaaaaaaaggaaaaccatttttaggcacaaataaacaaaccccagtaaatattaaaccaaaatcactcaaacaaaagcagcattgacagattcaacaacagaaaaacacaatccacaaaaaaatacatcaagaaaacatcaaaattatgccataaggaatataccttaggcgctgacaacggaggaaccaagaatcaacaactgagaaaccctaaatattactcacacaagaaaagaggagagagtgacaattttgtagagagagtatttagtatatagggttgggtacaacagttacgagtgtcactaaaatactgccctttacacctttttccccttttttttatctagcaacacgtgtccctccactataatttccttcttccgtacacagaaaaaacaattaaatttttatgcaatgttgcaaataataaataagtacttaataagaaatagtaattgataatttagaattaatttgttaatagtagattaaaatttatcaattgtgagaacaagatatacaatgaatgtgtgtaaagtaaatcctaaagagaaaaaaagataaatttgagtactctgattgaattgtaatgctcgtaaaaatggactttataaagatttcgtaaaatttcttaacctcgtttcattagttctgcataatttctaaactcgtattcataattaatttacacatttaaactattttctttaaatacggattgagattcttaccccttttgagagcatttcgtgcacttgatggacgatcttttcatttggacacggggataagcgaaacaattcagaatcaagaacgcttcatttgatatgattattaaagaaaacatgccgatgtctaaaagcgattttactgctgagaaagcaaatggtcagcgtgaaagttcaagacttagccggggcatcagcgaaattagattctcgtactgaagcgcttcgagatagcaaagcatagtagtgcagaagtccagtgtgttataaggctacactaagaaaacgagattgagtttgataaaaatttaaattaaatacgttttaatttcgaatttatctcgtaaatgatgtagctaaatttatgtaatcattataattttgttacctgctataaaatcttactttcttctaaggttacaaatgttgtgatatttatttaggtacttaccttttaagtaatttgagtataattgagctattggttttttaatggacttaattaatgtatattgaattatttagaaacaaattactttatcagaattaacaataattatttgtaattattcataaaaagtgtaactcgtcatctagaaaatactctattataataaattaaaatataccaatattgtgtttaaaaatttcacgttggtagcgtaagaatttgttatattatttaaaagttgattgtatggataaggttttaatggtgaaaatatttctaaataatttaaaaatatagacgatgaaattttgtatttgataccttaaatagcttactgtcaagtccttagtcttgaactaagtgcacgtgcggtaccaagcaagtaattcaagttctttttaatacaaaatattctttaataattctcttgtgttctaacattccttagcgatcttgagtgaagtatgactgacttggcatagcaaaaacgtgagcgagtgggacacttttaaaaatacgaatttgctagtttttagttttataaattttatcctatacttttaaaatttataaactgactccaacaattattaaagaataacttgttcttgtttttgcttattgcttaaatcccttctatgtgtattagtaaaattttaatcaatttagaaaagaactataaaaggtaaaattttaattaagtttaaatcttaaatgttcggatttacaatatagttcaaataaggaaaactttactgaacaaagatttagttggttttaaattcctaaatcttttaaaaataattaaatttatactgattaaactatttagaggtcaaacagttatatctttagcgtgattgctcagatatatttttaaatataagaaatcatgtataatatcttaataccataaaattttaaagaaatttagttaaattaatactgtaatttatatgctgaccctcgtatcgaaaacttcgtgattccttttcgaacaatggataatgtacttttgtccctttcgaagaaaaaaataattaatctcttgaatattaatttaaacaaatactaattattaataattaataataccaagaaaggggcagaatggtcttcttaagattatttgatgtcagtctttgaattcaattttgtttatgtcactgtaccctaaaagcaaatatagtacacttcaaaaagatccaattaaaaaacaaggagtacgtgtaatgaaactgtaaataaaaaaatattaacgaaaaaaagaaattgtaattataaatctaagtgatttaagttacatataacgaaattgtagaaacacgcctaacacttaacgctcgggattcgcccaataattccgatacaaagcatgtgttgaattcactaatttgcattgttaactctcaaagttctttaataaatgaatgattaaagttctttttatctgtagaaatgtaaaaattgtaaataactcaattaacaaactatattattgcatatttactaattgagaacatcgtgatggtgaatatcatttgaatatttcttctaaaaatagataaccaaaatttatatcgttacctgatagaccttcctgtcttagttctatgcttctcaaaaacttttagtgcatcttttatattttatttaggtaatatatcctgtactttcttttaaaaaagctttgttgtattatgttttttcttttacccaacaacttattcatataattatctagtacgtggaacctactagtccgaatttgcacttatatttctccaactaatatgaatgtgcaatttgggattgagaatttttgccatcaacataatttttctcctaaatttatatagatacactctactaatacatattccgtgcaaacaaaacagtttaactaagattttaatagtaagaagtgtttgaaactcattgttgatgttaactggtattatcacgctaatggagtagctagacaaggattgtacgagttaaaatcaaaccgaggaaatccagaacgcagagatgattattatgagtgatttgtaaatcaaaaggtttagtttggccgaggtcgaccagtgatcaatagagcaagccgttgagtggtctatcacggccaaggacaaacggcatagatagaagtaacgactacttttatattgggatcttcagactctctaattgtactttttagagttctttgggaatatctcatataaatagtataagagataaggcaaaagacacgtaagattccatatgataagaactcttttgaaaagtatgccctcgagataaatacaaaggacatatttctgaagagattcgacctttctggattatctattgtcattcgatccgagaagtgtctaatattttgttatatacttgtcattcaccattgtcaaaggagagaatcatccatcttattcgatattgggtgaatctttctccttatttacatttagtacatttatcgctatttaatatctgatatctctaacctattactacattcgacgcatctaatactaacgcattaaatccgtctctccactgctcatttctttcatatcaataatctgagatatgtagtttttagcgttaactaggattaactccctttaataaccgataaattagtttaaccaaatattatcgttttttggtaaacaatttggcgacgtctgtggagatttcctagtcaaagatttcctttcaaatctaaaagagaacagtgcaaaccttgtcttttcttgcgtgcatagtttaacatggcagataatggagaagaaatgatgaagacagtagctagtcttgcaaccaacctcctaaacaccatcaacgaggtcattgaaatgtgacagacgagcagcacggtcctcctcctttaacatatattactcacaacattaataatgcaggcgacgacaccgcttcgtaatctcattttacaatcacaatctttccttctaccgccgcatgagccttacatttggataggttcgaaaatattttacccgaaatagctacatgcattttagcccaccttatgtcgtcgtatggtttcaagtaattcccttactagcaacacgtacataaattccaccttatgccaccgcatgcacattaacccatatccttatatcgccgcatgtgcatcaatatcacaacataatcacaactcgcaccacaagtgcccatataccacaacttgccaaaagaatcaacaatactaatgtttccacaacaaatagcccatggctcaaccacaatgtgtatatgaatctcaacaataacaaaataatggtgaaaagctcagcaagaatgatatctcaataattaacaacttcgtctcgagtgatgacgacttttacgacatcaacaccaatagataaacgagaaatgttccatgaattaataacttcaattaagaaactccgcaattaaagaagtaacaagacaacaaggaaggcaataatttcaactaaagcatataaggacaaaataacaagtaagaggtggaacaagtgttaacaatgtcaaataaagaatatgagggtagattaagaataaaagatataacatgctatgacaattcgattaaaggcataaaaagagtataaatagcctaaaccggtcaaataccacatatagctcgtgtacccattcgtcatcttgcgtacatggctttcacatatcacaaacaactccaatactaagggattgttcctccacaaaaatttaggcaatatacttacctcaaacaagctaactcaatccactaataagccttttccgcgaacatccaacttcgaacggctcgaatctagccaaaataacttaatattgtcaatacaaactaatgtggggctataattcatggtttaacgcattatgtaccttacattttatgtgctttaatggtaaaattacactcgtttgagcataatggagtttatttcatggtaggagaattggagatggaagccgagctaaatggatgcatatacgtcaaaattgcgctcaagaatcaaaaggagtgaccatggctttagctaggctttagacatgtaaagccaggtgctaccaggctttagacatgtaaatccaagggctaccatgcgttatccaggcgttagacacataaatcctggtcataccaggcgttatccaggcgttagacacatcaagccaggtgcaacctggcgtttggctggcgttttccttgtaacgcccgacccaagatcaggcccagtccaagttttaaaggctttaagtatttcccggtttgactaggagtatcctacacgtttagggcttgtcccaaaacatataaatagacccaaaaacacaactttgaaggacttttgccattggagacaagaggagatcgtggaacactactcagaagatcaaaacattgatttttacatcctttattccttactctgtaatttaattatgcaagttattttggatttgattattgtgatcatgagtagctaatttaatcaatctaaagttttggtggaacccgctggggatgaacttattgtgatattaatatagttttgcttggttgttaatctctatttgttcaactacgttcttgttgtagttgattgaagggccctcaattagctgttcctatttattatgtatctacttgagagagagagtgcatatttaggtagttgtttaaacaacatcactcccggagtataggagagatccataaccgagggtttagaggttggattagatctcgggtgcaatctaaagtgaactgtaatgcaagttagctagcgtaacttgagagagtacgtctagtagattatcataattactcgacagagatttatgatagctggagtgttcatgattgatagagacaactaagtcaaaactataggaaatatacaataaaaaaattcgtcaatggggaaaaccataaccttagacctttattacaattgtttacacctcgttgttagttaatctttagtttattattttcgttcagttgttgtagtataaacactaccaagtgatattcataacttttgagaaagttgattattgagaatttagtaatctaacaacaatatttgatacgttagttccctgtgggattcgactctgggcaaaatacccggattatatttgcaacgcccgcttagtcttttattagatatagttgagcgtgatcaaattttggcttcgttgccggggaattaacggtgctatcaattatagttggaagaaacacaaaaattcttagtgtagtcaattttcttcactttcaatctatacattgaaattttaacatgtagttgtagttgtacatattgctaggtttcaagtttgaattatttttttcattatttgatttttattttctttattttagttttatttgttaatttaaaaaaaaatggcatcatggaattatgagaatttggacgttggtaattctactattgatcttcgttgtgcatactatggaggaaaccacccatgacaaaattatcaaaatattcccaagagcgagttatgtgcaccaactcaatcttatgtgtggaatgtgtgtgatatgtgtgtgatatgtgtggtggtcaagatgaacacattcatggttgtgcttatatttcttatctccccccaaccccttactttgatggttcttctttttcttgtgaagttaataggaacaaagaacccaggtatgaggacctgaaggagatcgaggatccgctaaagtgccttatggaacaatatgataaaatacagttgcacaaccactcacactgaaccttgtaaagtgcaacaagtttacattgtggataatagccaagaagaaaatgaattggctgcagagattgccattataattgaagatttaaaaaaatacgaggaaatgctagaggaagaggtcagagtagaacaccagcaatcaatcgaactagattttgagtatgccgatgtcgtagaagagatactagagtcaaccaaggatattaaggatacatatttagttgactctagtgtcattagtgttgaggatgttgacaatcccaatgtttatgtagttgagcgtattggtccacactccaagcactttttcacattgtgtttggatgatgatatggaaatagaatcgtccgagccacttgatgagtcagggagtaaggaacaagatgcctacattctggaattcttcgtgccagaaagtcgggaatacacatctcatccaaaggccaaggagtgcagaatgctacattattttcttgggctagttagatttgttccaccgccccaagagcataatcataagcttgaagcaaaacttggggtccaattcataagttcaaagtggaggcaaaaagtgattcgcgtcgtaccgcaacgttaaatcaagtgcttgttgggaggcaacccaacttttttttatatttttattttagtttatttttttagtgtattattcttgtaatgtcgatttttgatttttttaggagcatggaatgcaaagccattggaaggatgctatagcaaaccaaatggttggaattaagtgtgaggtacccgcacgacggaccaagcctgggagaagtctgagtaccccatgatctgctagtgcttcggcctttggcataccagggagtttcttttacccccttattagtatggtgtgcattggggacaatgcacaattttaagtgtggggtgaggagattgtctgggtgactttccatgctaatttagttgtgttagtttaatggaataatttttttatttattttacaaaaataaaaaagattggacttttcccgacaatggatctattagacaattttctggaaggaagtaagtctaaaaaaataccaaaaatatttttgaattaggtagtgtagtaattctcccttgatttttatttgggccgcagttctttttcaagggtttttaattgaaccgggtgtaggtagtttttaatttttaggagtaggaaccacaaggctaagaaattaatcacaacaatatctctgaactttgtgatgctttgagaatagtcagtactctggttgtgactcttaggctcaatttttgactctaggataaataccttaaatcgtggattcttaaatttgcttaattgttttgactggagtgtcatgatagaaccaatcatgaacaagttatgtgttatgtcagtgtgagattttgtatgtattctatgcactgcatttgatgtctagaacttgccctatgtgtgtgcgaaatgaaatagtagtattgttctgtctaggaagtgatataggcgtttctttgttaagcaagatatataaactttacccacccaaatgttatgcatcgtagttaaccccgttgagcctataatcatgtttcgttggtaaccacattacaagccatacccctttgtttgaatcgatcctatatttgaaccttgtcacctctcgtaagcacttgaattgtgatgaattatgaaaaagttaaagtatggggtggtgggttggttttgagtggaacaattgaaataaggagaaaggtgcattaagaaaaagaaacttgccaatcgaagccacttgagagaaaaaaagagagagaaaaagaaaagaaaaaaaacatatgacaatagtatattgtatgaaaaacaagtactgatgatggtggctagtgatatatgtgtgcttaaagaaatttggggtaatataaatagaagtaaaggtggaatgtttggtttgacataagtatgtgattgaaggtttaagtgtttgtattaaagtgcttaaggaaggtgtagtcactcattccaaatgtatcctacccgactcgcagcctacattacaaccaatgaaagtcctaattgatcgtagactgaatgaactcgattagtagagtattacgctacgggaaagcatatggtatatcatttgtggcatatgaatgttacttctgtgagcgagctaattttgtctatcttgagttcctatattcttgaaaatttattgagtgtggaactagctctttgatttggtgagggcacatgattcataagagaaaggtaatgttgttgacctctatgttagagtagttagtgggttgtgaataaagcatggtatttgtgagacgattattgaggtgaggatgtcacacctttgtgcttaagctattttaaaaaaattcttggtgtaacgagtcaagggattttcttaataagttgtgttcatgggtgtagattaattgctcgaggatgagcaaatgtttaagtgtggggtgtagatgtggggctataattcatggtttaatgcattatgtaccttacattttatgtgctttaatggtaaaaatacacctcgtttgagcataatggagtctatttcatgtgtaggtgaattggagatggaagccgagctaaatggatgcataaacgtcaaaattgcgctcaaaaatcaaaaggagtgaccctagctttagccaggatttagacatgtaaagtcaggtgctaccaagctttagacatgtaaagtcaggtgctactaggcgttatccaggcgttagactgttggcccatgtcactgaatgggtgaaccaggtccatctgagcagacacatctgaacgaagcggttggcacaagaatcgtacaaagctaggagatataagttatttctgagtatcaaagaactaagagaatgtctcctaatacgaaaagatttcaaactgatagagatgacataagttgataccagctaggacagaaatagaggaaggaagttgagttgcattcgaactcatttacacaagcagaattgaactcaacaactgactctataaatactcaagggattactgctgaaattacgaatgcacaaagatcaaattgaatcaagttctgaaagcaaaattcccaggagatttgcaagcagaagtattgtgcaaaggctacagttcaactagaagaaatagttccaacgtctagttgatgtgtagtagaagttttaatattgtatctttcagctttcttagaagcaattgtaataggtacaaattgttcaagttagagttagcttgaattatgtagaaattagctagaggctagttgatacaaagaggattagagttagtcctaggattataaaagagtttattttgtaagtccgtttggcttagtgtttttagtgaagtttgagaaaatcctactgaggagtaggtcgtggttttttcaccttttgagccaggtgttttccacgtaaaaatccctgtgtctttactattactgccttattattccgcaaacagtagtaagtagccaggttcttcttattagacaacactcgaaaattgggtactgcacaattaacttataatattgtgtagtattgaagtctaaaacatcattgacacataaagattggtcataccaagcgttatctaggcgttagacacataaagccaagtgcaacctggcgtttggcatgcgttttccttgtaatgcccggcccaagatcaggcccagtccgagttttaacggctttaagtatttcccaatttgcctaggagtatcctacacgtttagggcttgtcccaaaacatataaatagaccccccaaaacaactttgagggactttttccattggagacaagaggagatcgtggaacactactcagaagatcaaaacattgatttttacatcctttattccttactctgtaatttaattatgcaagctattttggatttgattactatgatcatgagtagctaatttaattaatctaaggttttggtggaacccgttggggatgaacttattgtgatattaatatagttttgcttggttgttaatctctatttgttcaactacgttctcgttgtagttgattgaagggccctcaattagctgttcctatttattatgtatctacttgagaaagagtgcatatttaggtagttgtttgaacaacattactcccggagtataggagagatccataaccgatgtcgcacccccttttccccctagcaggtttaggtgcggagagatcgggtttatgacatttcgagcaactcctttaaaaggaaaaggtgtaaggaagagtcgccacctaacgattttatggtgcgttcgggcaccttgagtagtcaactcataaactagtttgcattaccagagattgggtaagggcttgaagttatcccaaggggaaggtgttaggctcccctcaagatccgcaactgtgggtcccagccaaatagtttcgtgaatttggacgataaacaagtaacaaacaaggctcacgtaagggggaatttcaaacaagtatgggagacatttattagaaaaggaaagactaaagaaatatattaaaaaatgtcctaagtttgaagtaatacggatcacatcaatgcaatacccgatagtcagagctacacgtggtattagcgcaccggtcataatatctgtattctacccttcctaccccgccaaggtatttaaagcgcgtgtgttggtcacgaagcttattgcatgctattacccgtcccatcctatcagtcctgtagggtatttaggactattattcctacaaggcgagtactaggctgtctcctaggtttaaagggtaaaattctaagcgacaagtaaaaaacagttaggacatacaaatatgggaatgcacataaacaagtacatgactcacatacccctcccaaaattgtacacataaatagcatgactcaagcacacaaaagggtctcaagtttcagaacctaaggcaggatttctaggtgtgaatacagtaacaggacaacctgattttagaggaagtgtcttgctaattttagaccattataattagcaagcagtgtacagaaatagtttatggttttaataaatattggtgcctaaagtttgcctaggcgtctcaaatattctaattgtcgttttaggaaatagacagaatgcacctcttttagacttagtgctagtgaacaggtgattatgtgatcatatatggatgcaagtcctataggcatgatatctaaaatgcaggcagcatgcaatcagatttggtttaaaaaaaggaaacgtttttaggcagttggaatctattttagcgaggttgcttattacacagatggtacatggatatagttttaaactatcgaacctagcacatgatttctaggcgttctttgcagtacaatctaacacaagagtctgaatacatgttgaaaacaaacaaattcctaagtcgcgaaaagatgtctaatgcaatttctgatgggtacttgttattatgaacctaaacatgatttctagatgtgaggcatgaatatgcaaaatatggtattattaacaaccatttcatctagttatctaactacgaacaggatctctatgtgagaaataattataacaggtatttttagcatgatttttctaagtgagtatgcatgtgatgagatgcaaatataaatatacctaagacatgatttctaatgcatggtagatatgtcctaaacaggatttctattgcacacataggtaaagtaaatcctaagcatgttttctacccagaattatactaaacatgcataatcccaccccttttcactattcagccccaaagttatttttacacttaattattacataccattattgcacaaattacacaaatgaataagaaaattaagaagttacattataaggggcctaacagtaggcccaagtaccatatccaacatgccatataccaagacctcttgtaacccaggtgtgtcagagttcctaaggatctcaggggatcccaggcagtgctcacacccaagttccctagccaggaatgagtaagtgcagtgtggaataccgaccttgtgtgtcagagttcaatgggtactcagaggtcccaaggcagtgctcacacgaagggggctgaacctaaagtctaagagtagtgataggtgcttgtagcttaaaggagtgttgagtttgaaaaaggttttgaaacaacaattttttaaagtaacatcagagaacaataaagagttttataaaacagtttgcaaagggagaagtagtgcaaccacaaccaacagatagagagttcaagaaaacaaacacaaacaaggatagggagttggggacaagtaattcatatgttagcagcagaatagagttactggttctcaaatgagtatcacatagttgtcacaaagcatcacatatcaagcagagtcacatattaggtatatagtcagaatcatatagcatcaggcatcatgtggggggacacatgtttgtaacatgggaagctaagtaagggatgaaagcatgtaacaatggtcatgtcgagataagaaacattaacccatagacaaataagcatactagttacatatgactcaaacagagtcacacaagagaaagcaggagacacattagactaaggggaaaggaggaataatagagacgtgctaattacataagactcaaacagagtcatagggaaccacatgaggaaaacagaatacttattagactaaaaaaagggaagggacattatagggtcatgctaattacatggtaggcagtagaaccacaagataaagcacaaaaggaataagaagtagattaacaagaactgaaacatattgtgtagagatattataaaattaacttaggagacataccagtcgagtgatatagattagcaaagtgcaaagagatagagcatcaacaacaatatgcagaacaagagagcaacaaggtagtagtgtgcagaaacaggaaaggaggtgtatggagacaaagaagattaagaaacaatgttgatgttctgagtttgagggtgcttcagtgatatgcaatgtatcaagtgttcgtgtgtgatatcattgttctcaaatgtcagtgtgtgttatgtaaagagagaagacatagtatatatagttttgaaaacgagtagtaacataaggtaaagagtgcataattatggaaataataaccaattagtaacacttaagatactagactcctttaattagggagtcaagttcaaacggtgtaaatcatggctaaataaggaaaaggaatcaatttataagactgattttattaaattagggacattgaaatcatatagtacataataaaagccaattacatagtaaatagttaaagaaagttgaactaacaatatattcataaagcaaagtatggtgttagctctgaaaattagtcaaaaggaatctcgatgtaatcacaattacagaaaattcggtataatcaaggaaaatatcacataagcaaggaaaccattcaaaaaattaacacataattacaaaggaaatacaaaaaattatctattcaaggaaaacatcacaggtctggggatttttacacaaaattagtataaatcattacgtgaataatcagtaaggcaaatagtcaaacttattagacgtttaaacaatggtcattgaacaaaacagagaaaccctaagcaacatttatagaacaacagaagattaaaaatcatagcaacgaattaaaacaagaatcacaaagaacacacatatagttttgtaagaaacgaatacacatagtcacgtaataaaggacatcctagaaaattagggttttagcgtaacagttcagacaacaagaaaagaatgagatactcgttcgaacacaacagagatggctaaaaatcaaaagaagaattgttttgaaaacaaggttaagaaaccctaatttttgaagttgttaaaaataatgaaattttttccagaaaaatatagaaaagtttcataacattgtagatataagacagaccttaaaagaagaactaaaatatagagggttagggtttcgtggaacccagaggaggggaaagcctcatagatggtatcggttttaggccggaaagactgtaacacttactcaaacggtcggggaaaggtcggaaagtggcatgaggccaatgggaggtgggtgaaccgctccaggttcatctgaagaccccagggtatcactgagctggtgagaagcaagtagatggccagggggtgatggagaaccaggtttcaggtgagaatccaccggagaagacgaacagaaatcatcggagaagacgaagtcaaggagacttctagagagtcatagagatatggagagatagagagaggaaccgtctcgaaggaaatgatacgtgaaagggggggggggttaggttagagttaaattaggtaagttatatctggaccgttgatcaaatttgatcaacggtcaagatcgagtcacatgtgggccgggtatttaattgggtttgggttcaaaaggaatcaggttagttaattaggtgggttggaattgaaattgggctagaatttaaataaatgtggctagctgttaaataccccctttaaataagatgattaattaataaaaatagttaataattgtataaaataaaattaaatccaaataaatgaaatcaagataattaactactataaaaatatagaaacgatcagttgtggatttaaaaagcgatataaatgtacacttgtgctattattgcaaagttgttaaaaattagcttaataatgccagattgccagtattggctagtttggaaaataattaaatcccaatcgggtaaaataagattaaaacaagatattgagttgggaagcattttgaaactatttataatacaatttatgaataattattgaatataaaatgccaaataaatggataaaaatatgaaaaaaatcatggaaaactgccaattattataaaagtgattttgaaggtatatatgcaagtttgaaaatagttttgagaaaaaaataggtatcaacaaccgagggtttagaggttggattagagataacgataccacaggtgcaatataaagtgaattgtaatgcaagttagctagcgtaacttgagagagtgcgtctaatagattatcataattactcgagagagatttatgatagctggagtgttcatgattgatagagacaattaagtcaaaactataggaaatatacaagaaggaatttcgtcaacgggggaaatcataaccttagacctttattacaattgtttacacctcattgttagttaataaactataagaaattgtttctgataataaagttgcaatatttaaagaaaatcaaaaagtcaacttgaaaagtcaacatcgggcccgtgtctcagaacccgaccaaacatataaaatccaaatatccattcaataacgagcccagcaatactaaaattatcgaattccgacctcaaaatcgaccttcaaatcctcaaattgtagcttatgaagttttcaccaaattttccaaactttccaacttaaaacactaactaaatgataaaaacaaggatgggttcatgtataataatcaaatacgagttaaaaacacttaccctggtcaactccttgaaagtcccttaaaagatcgcccaaaattgagctctaactcaaaagatgaaaaataactctaaccctcgatccaaccccttttcttccaatctattccacagataagctcttcacttgcggaagaccatcgcaggtgcggcttttcattaagccaggaagatcgcttatgtgaaccgttgtgcacatctgcgcttgcgcttttgtggaacaaagccgcttctacgcgtccgcttctgcggagaaacgaccgccatgtgctcacagatcgaggcctaaaatcacatcaaacaacataaaatttaggaatcgcaacccaattcaaaccttttgaatccacgataattcaaattacaaaactaatgtcggaacataccaaactaactccaaatgacctcaaattttgcacccaagttataagtgacacaacgaacttatttaaacttccataattagaatttgaacccgatatcaataaagtcaactatcggtcaaacctctcaaccttccaaacatttgactttctaactttcgccaattcaagccaaaacgacctacagacctccaaatcaatatccagacattctcttaagtccaaaatcaccatacgaagatattataaccatcaaaactctattatgaagtcgtctatataaaagtcaaactctggtcaattctttcaacttaagcttccaactgggactaagtatcccaaccactccaaaactcacccaaaacccaaaccaaccaccatggaaagtaacataactacaatataatatagagaaggcaataaataggggaacaaggctaatatattcaaaatgaacgaccgggtcgtcacaaagttttagggtgtgattcttggtttcgacgttgttttatgtgttccgaggcttctatgaggtccgaattatattttttgaacttgttggtgcatttcgacggggtcccaggtggatcgagtgtgtttcggaccacctaaagttaagtaaaatattgcataaattctgttgttggtttccttcttcacgaacatggaggaagacacacgttcacgatgaagggattgggcaggggacttttttctccgcgttcgtgaataggtgacgtgatcgcaatgatctgggacactggacttcgcgttcatatgtccgattagacttcactatttcgaggctccagtcgagttcatgaagagcattttcctagccttggcaggttttgcctttgcgatcgcgagggacttttttcgatggtgaagaagggatcattggacagaaactcttaaaagtccgcatttggcttatttttctcattcttacactttgcttggccaattttggagctttttagaggaattttcacctagaaattgaaggtaagtgatttctacattatgtgagtttacaacatagattatggatagattataacatagaaatcataaaagttatgggggtttgatgaaaaaactaggttttgataaaaatgggattagaccacgaaattgataatggaatggagtagaaattatatatttgagttcacaaagtcatgggcaacattatttacgaaaatttctgaaatctaggcacgtggatccggggtgacttttaggaacttatcaaattcggttgggtaattactctaatagttaaattttgaacttttgggcatatattgatatgtttgtactacctttgtctattttttgatttcacggcattgatttgatgcaattggtgtggttgaagagccgagtagtaaacttggaagcgagataaatctatcgcctaatcttgtaagagggaggtatccccgtgtgctttaattgttatgtgctacttgtaggggggggggggggtcatgtacgcacgatgtgacgagagtccatacgtagataaaatcatatttttctctgggtagacataggacttcaccgtgcgaaaattttaccacttgaactcaaattgctagtttcataacttagatttatacttgaaatttgattagggattatgttggccgagcttccttaccttgaagttttggcggaatacctgattgttggtgaaagttatgctttctttaagtgccatccttgtgttgcagttgtttggcccgcagttcgaaaagtttcttcattcctatggatcagaccgaacgtctcgacaatatgtttgagatgcatctatggttcgcaccggtcgaccctcggcagttacataattaatatggatcgggccatacaacctcatcacaattcctgcgtaatactgttagaagtctgataatacttaatatttcctcctatgacttgagaattgttaattacttgatagctcttatttgttgaaattggcatgtgataattggagatttaaaattgatatttggttaaaaaattacttatatattgtttcttatttcattgttattgttgtatttcgccgcttatttataattcatgcactttatttcttgatcattagtaagtgtcgatgtaaacctctcattactacctcttcgaggttagactagatacgtactgggtacacattgatttacgtaccaacgctacacttctgcactagttgtgcaagttctgagactggtacatcttgtggtcattcggacgcgcatccccattatcaggagacctagtggtgagatgcttttcatgctccgatcttgagcacccggagtctcctccttgttgtatttactatttctatctattttatttcagacattaactataggagttatttcatagatttctctgaataataagccaatagaacttatttgatcaatacgcaatccaattccaaattgtgtactctttattgaactttcaatatgtagtccaagaatttgttgatattaaattcagtagatctcaaacttaatcaaagtgaatgcttcgggcttctccacacatatgttgaacccaatttcaaatttgttaatgcttaaataaaatttagtacgttcattctaacccttcattgtacgtgagaaaggtggagatacagatttgggtgagaatatagcctaatgcatctgattataaaaaaaattgcctaccgattctctttctacacataaaatggttcctagtctatgaacgaacgtggtcctatttaattcaattcaaatgtgcttaagaaagtaaaattctttttccttttctctttaaggtcccaataacagttgccctggggccaatgcgaagcgagcataaaactatatctaccaaattaaagttcctaaacaatattcctatcaactgatcaaatctagttgtagaattgtcgtagtaaacattttacacttccagatgctctaaagttgcacatgcacgcaatctccctcgccaagctagtatgatctctgatagtcccttcaagtattctatgatttctttccttccatatagtacatacgtatactcaacatagatcaactcgaggagtttagctggtgttgtcttccccttggagtgttaacaaacaaactggaggtggtcatttcatgcactgctcatcgtgttctggaaatatgtctattgagtcagtcttctccatagatctttagcataattatattcagcaaacaagtggttcttttagggattgattgacttgtcaagatcttaattagtatatataatttttcatgaaatatacctgtgtgtaaattgattcatcgacttataacctactccgatgcattgttgaatattcaaaacaaaacgtcacgacctataccaattaatctgttataattaattcatcgacttataacccagtgatgaataaatgtaattcattaactctgttataatacaaataatgaatacaatatcatatactataacatgctatatatgtaattaaagcaacacgaagtgtgtgtgttatatatatacacacactaacatatactataacaagatatatatacattatagtattacagtgaagtgtcagtgtgtgtgtgtctatacatacatacatatatataagacacttcgttgtacaattttaactacatatatagcatgtagaatatattttagtgtattcatctcttgtattacaaaagtgttaacggattacatttatattatttagatagtaaatataaaagtgatttaattttgaccaatgttgacctgaaaagcgaccaactttggtcgctaattatccagaaattaaaattagcgaccaaagttggtcgctaaatttaagtcagatttattttatattttatataatatttcaaataataatataatggttaaacgttagaactgggtcccagattagcgaccaaagttggtctctatctgcttcccatttgttcagcgaccaactttggtcgctaattttaaattatatttatttatattttataatattttttaaaataataatacaattattaaaattttataactgggtcccacattagcgaccaaagttgatctctatctgcttcccctttcttaagcgaccaactttggtcgctaattttaaattatatttatttatattttataatttttttataataataatataattattaaaattttataacaaagtcccactttagcgatcaaagttggtcgcagatttcaatatttctttgaccaagcaagtctgaccagtccggtcaacattttgaccacattagcgaccaaccttggtcgctaatgtgtttagaattattttttgataattttctccagtttagcgaccaactttgatcgcttttcttgacaaagcaattttgatcgcaaaatattggtcgctttttctcggatttttagtagtgactccatatttgatgtctaaggcttgtatccacttgatccataatttgtcttgcttatgatataagtcccaatatattttagcaatagcagcaacatttcatatatgtaggttgttcggggtagaggcctcccacgcacttaggtaagcagactttttcctagacaatgagagtttttttgtcatttcattttcaccggaccacatgtagcttttatagaaaacttcaatcatttaaatcactttagctagtaaggaaaaaattgagctcagtagaattggattccaaacagtagtgtctgtattaattgcaccttcctgcataagatgactgttttgctgttcatgaggttatctttgccactgttttattgatgtcattgtatcataaccaacttctatgtatctggtggtacccctaaatatttaaaggggagttgcctttgagattatcccaacaactggcagactgcttctctaacgttgtcttccattccaccacaatatataacactttttgctaaattagcttgtagcccaaaagcagatgaaaatattgtaaaacaaacttgtagtctctgcactgactctgtgtctcctctggtaaacaatagtaagtcatcaacataactcagatgagtaatatgtggtttcccacatctaggatggtatttgaatcttctgtcttgcttcagttcattgaggagtctgctcaaatattacatagcaaagaggaagggagagattggatctccttgcctcatatctttagcaacattaaaaggttatacagactcccaattaagtaggatggtgtaattgattgttctgacacaagccattattcattttatgaacttgttagtgaaagccaatccttccaaaacttgttcaaggtatatactcatcccacaaaattataagctttttgtaagtccaccttgttcatgcatctgggggagatacgtttcctactatatgatttgaccaactcatgagccaaaattatgttgtcagttatccttctcccagggatgaatcctccttgtgccccggatatgttgtaactcatgactttttaaagtctcccagcaaggacttttgcaattagtttgtacaatattatgcatcatgttatatgtctattgtctttcacagtatttgggtttgcaatctttggcatctgagttagtatcgtgcaattattggctttgtagaggacccctatggtgaaaaattctttcactgcctcacacacctcatccttgatgatagtccatgctttttaaaaaaattcagcattaaatccattaaaacctggagctttgtgatcccttattgaacatatagcctcatacatttctgtatcagttactgttgcacacaagtctaactgttaaaggtgtgacaatctaggttcatttcccatcgccaacatcttaaccccatgtaaagtagttgcatctgatcccaccatggatttataaaaatctggaaactctgctttgatagccttgagatcttgcaattccgttcctgtcaaagaggtgatctccaatatatgattttgttgatgcttttctttcatcacagctgtaaagtattttgtgtttgaacctcccagtttgattcatgtagctctagatttctgttgcattgcactctcttctatttagaggatgaaggtagaggagatgaggatgctcaggtagatgtgcgggcacactaggatagataggattaggaatgaggatattcgggcgaaggtgggcgtggccccggtggattagaagatgcgggaagcgaggctcagatggttcgggcgcgtgcagaggagaagccttgatgccccggtgaagaggtgtgagcggctggcaatggtggttcgagaataggtagatggcgacctaagaagtattgggaagaggtgattaggcaggacatggcaaggctgcagattatcgaggacatggcactggataggaaggtatggaggtcaagcatcagggttgtaggatagggggttctagagcttttcttattttattaccggggtgaggagggttggatagggtttaccatagatggcttgcggattttattgagctcccggacggcagtttctggctaatatcattgcatgtcatttgttttatgatttccatgattaggttactatttttgcgatttctgctggagttactaatgaattgtcttttcttttcttattttcctgtgttgaggttcgagtggaaacaacctctctgcccttttggggtaggggtaaggtctgcgtacgcattaccctccccagaccccactgtgtgagactatactgggtagttgttgttgttgttgtttaggcgtacattctcttgatcaaccagatatttagagtagctggtttgcatttcttgttggatctctttcaatgtgatagccttggtgatattctcatcaactcctccgaactcctcagaattgagttgtttgaaagcaggcttcaagaacttcaatttaagccatacacttttcattttttcacctatttcttttttgtcccacccttcttctacaatctatctgaacttaatatgatcagtctatatgttgaagaacctaaaaggtactttgatgttttttgggggtctaaatggtattaatatgggcacatgatcttaaataaagggatctccaaatacagttgttaaatgtccatattgtaccatccattcatcatttgctattgctctgtccagtctgctacaaactctgtctgctccttgttgttgttagtcatgcgtaataatcacctctccttggaatttcatttattaataaactattgtaatggtttgagaaatcttgtagttctactaaagtaaccgaagatccctgtctgccttatgggtataaggcaacattataatttccactcaaaagccaaggaatatttcctctaggcgccaagacttgaaaacatcatattgttcttttctccggtcaactatagtaaaaccatatataactgtaagaaaacaacttattccattctacataccattgacttgacagtaagttagttgagctgcttctatgataaattgatagcatagactttatgatctcataccattcatattctgccatttcttacatctttgtagtaagataatctgtcccaattaggagtcaccttgctaactatatgttgtgcttcattttcttttactctagtttctaaaagagcagtcattctaatatggctgtcttagaggtattattttagctctttatgcttatacctcttcttgatccccttaacattcaaaataactaggtcattgagataacccattaccacctcctatatatggagcttggcatttacaactctctgattcccttcaggtaaagcttgaaattctttactagttgacacaccttcttgaatttgtctggacttagtatttctcattaaggctgacctcttaatctgtttgttagtggggagatgctctggtgatttttgtccattgcttgcaccttttgatttagcttttatccatcccccatatgcattctcctctagtgcatttaggacatttttgcctctggctatggtatgttgtctgcctgctgcactatttactgttgttgcccttgtttcagttgatcccttgcatgctgttgttggccttttggcatccacattggaacttgtccaggtcttctgtttctctgagcttgcattgcttttccctcatgcttcctcttcccacaatcatggccaatctttaggcattcagaacagaactctggcttccattcagtttctatgggctactgaaactatctaccatatggatctttaactgtaacttcattaggcaatcttttagtgacatttacctcaatcagaattctaccataggatacctagtttgcttggtaatgtattgattaacaaatattgggttgcccagggtgttggctatcctactcagggagtttacggcccaacaattcacggggagcttagggattttacctagagtggaatttcggtaaggaatgaagcattaaagtcaaaatatggggtccacttcttgaggataacttgcttactattcatggtatatggtcctccatacaagatatcttgcaggtggccaaagctttggaatttaaccatatggtatccctcttcatggaggaataactcaggttcaacaactatgttccaggtttgagaaatgtacctatgcatccgattgtagccaactacttccccaataatatagacaatgacaactttcctccatttttcagtctcactttcacctttgttttgtctaaattcacgacatgttgaccatttacaacttttggagcaatataggttagaggcatgccattttctacatacctatttccagtaaagagtttcgcccatggcgcttcgatcgagttctccttcacagtgctagtaattctggtcgtcgttggatctcctcattttggaccttgctaggtcgtttctcttgtccaattgatttctccttactgttgatggagctttcttgatttattgagggatttgtactcagaaccaatttcttagaagcatgggtattcccacttcaagtgacgtagccggaaattaagccccaattgggctacgacttgctgtgtattaccatattcaatggtgtatgcaatcacactttctcttacggatcttcttatagttacaaacgattgatttttgaaaggtcttcctctcttcctatccatggcgaccacagaccggtgtaggttagcaaaacctacgtcgcgagcaaagctagagagagaagaaaagctctttatatatattgattttcttgctaaaatgttcttttctagttactgcattagcttgttaatattagttaatgtcacgaccctattccacgtcaggtcgtgatggcgtctagcaccgctactagtcaagccaaccataaaaaacctagtgatttccatatttatttatgaatttccaaccactaatttttacttaaatttgaacatttagtacttaacagatttacaaggtgattggtcagggcaccactagaggaagtcatgaatataattttacaacccaaaagtaatagtgtgtcaagatctaatgtcacaagtacgagggcaactagtagaatgtacaaaaaatatataactattctactgtttgagatagtatagacagaaacaatcaaaagagaaactctagccatgctgttgaacggctcggaaaggggggaatctcactgtgaagtctcgaacagatatcaataatgcgcgttgggcagataactagatgcacctgcctaagatcctgtacaattaaatacaaaagcgtagtatgagtacataaacaatacgtacccagtatgtatccaatctaaccttgaagaagtagtgacgaggggtcgacttgacacttactagggacaacaatatcataattaaaatgttatgctaagcatggataaaatgaatagtaccgacaacaaatatcgggaagtgacaagttcttctttcataaataaaatgtcattttccgtcatattattcaacaatttacatttcaaggcattaaaacaattcaaatcacaaaaagttccaaataaataacatgcgcaagttatgccgatgtcgtacggcctaatccaacatattgaatgtgcactgccggagggtcgagcgacgcaaaccatagatgcatctattcaccccgctcgcgaatcattcatgcgacgctgtcaaatataaatttaatcatttaaatcaaattctttcttaaattcttttcttaaaaagaaaaaggcaattcaactgcaagctttaaatccttagactcaacttgatttcatttatcacaaatagcaagtatcataaaataacgacgttcacaaagcatcgtgtaaacctaaactacccggacataacatgaatagtatatacgtatggaatctcgtcactttgtgcgtatgtagcccccgcaaatacacacgtttttaatcaaattcacctttgggaaaaattccctcttacaaggttagaaaggagacttacgtcgtatcaagcttacttcccaaattcaagaacacgctcaaacctccaaatttgacacccaacaactcgaagctagtcaaacattatataagctaatcaatctatgctcaaaagttcataatttcacaatttaaatgattaaccaacctaatttgcaagattcctaaaattcacccccgacccacatgctcgaattccagaaatattcaaagaaagttgttacccataaccttaggaacataaatatataatttttactaagttccataaccatttttgtggtaaaactccatctttctcaaaatcctaggttttccttaatttttacgtgttaatctagtcataatctatatatttaactcatgttgtgtaaaaattacttacctcaaagttctaggtgaaaaccctcttccaaaagctccaaaaatcgcctaagaaaatgaagtgaaatgaaataatggcttaagtcccgcattaaaagagctggacatagccctctaatgtcgcatttacgacaccaggttcgcaaatgtgacaaaagcctcgtaaatgcaaagactaggcttcagtggttgggattacaaatgagaccaaagagtcgcaaatggggcttctgctgggatcgcaaatgcggcataagtgtcgcaaatgtgaacactgcttgggtcgggctccttcgcaattgagtagacctcatcgctaatgcgaggttcacatttgcgagatctgcagtagttgccaaggacactagaaatcaggtgtgttctcaaccccttccacacgtccgaaactcacccgagccctcggggctccacatagaatactcatacaagtctaccaacatcatacaaagttgctcgcatgatcgtaataccgaaataacatcaaaaactaagaatcgccaccgaaaaccaatgaatcaaacttaagaacttcatttcacttccaatgcgccgaaacttacttactactcggaatgccactatattttgcatgcaagtcttaaatgacattactgactatcccagtctcggaattccgtttggacatcgatatcaccaaaatgcgttccaaaccaaatttatagaacttctaaaaccttcaagaactaaatttcactattgggcgctgaaacactccctggtcatccaaaacctggtatgaaatactcccaagtccaaaatcatcataagtacccattggaaccatcaaatcccaattccgaggtcgtttactcaaaatgttgaccgaagtcaaacttggccttttaggccaaccttaaggaaccaagtgttctgatttcactccaaactatcccaaataccaaaccaactatctccacaagtcgtaaatcagtaaaagcaagtatgagaagtcttatttaggggtacggggttctagaaagcaaaacggccggtcgagtcgttacattctccaccttttaaacaaacattcttcctcgaacgagtttgggatcatacctggagtgctgaataagtgtggatatctaccccgtatgtccttctcggactcccaactcgcctcctctactagttggcccctccactggaccttcactgaggaaatcctcttggacctcaactggcgatcctatatatcaacaatagcaactgtatcttcctcgtagaccatgatctcatctagctgaataatgttgataactaacacatgaaacaaataggcgtgatacctccgaagcatagacacgtgaaaaatcgggtgaactcctgataagctgggaggtaaagcaagctcataagcaacctccccaactcgcctcaccacctcaaatgggcatataaacttggggctcaacttgcgtttctttccgaatctcataatacccttcattggtgagaccttcaagagaaccttctcgcgtaccataaatgatacatcgcgcgccttctgatccgcaaaactcttctatctaaattgtgtcgcacgaagtctctcctgaattaactttacattttccaacgcatccttcaccaaatttgtatcatataacttagcctcgtcaagctcaaaccactcgatgggagaacgacaccgccgaccaaataaagtctcaaatggagccatttctatgttggactgataacagttgttgtaagaaaactcggctaatggaaagcactgatcccactgcccccaaagtcaatcacatatgcccttagcatgtcctccaatatctgaattgtctgctttgtatgcacgtcggtctttggatggaatgatgtgctgagcttcatacgagtgcccaactcactctgtacaactctccagaagtgcgaagtgaactaaggacctctatctaatatgatggacacaggcacacagtgcaaccaaactatctctcgaatgtaaatctgggccaacctcttgaagtgtaagtagtggctaccggaatgaagtgtgtcgacttagtcaaactgttaacaatgacccaaactacatcgaacttccacaaagtccgaggcaacccaactacgaagtccatagtcatgagctcccatttccactcaagtatagtcatctgttgaagtaggccacctggcctctggtgctcatacttaacctgctgaaaatttaagcacctagcaacatactcaactatgtccttcttcatccgacgccaccaataatgctgtctcagatcccaatatatctttgtagcacctggatgaatagaataccaagaactgtgcgcctcctctaggaacctctcccacaagccattgacattaggaacacatatacgaccctggagccgcaagactcaagtctccaatataaacctctttggcaccaccctgtagtaccatctctctaagaactgctaagtacggatcatcaaactgtcggtccttgatctaccccaataatgaagactgagcaacaacacatgcaagaactcggggtggtggtggtggtggggggggatctgaaatgtccaacctcacaagtctgttagccaaggactgaatgtctaaatctagtggcctctcctgtgctgatatgaatgccaaactaaccatactcgctaccttttatcaaggcatcgccgaccacattcgccttgcccagatgataaataatggtgatgtcatagtccttttgtaattcaagcaatctacactacctcaaattgaaatcccctttgcttgaacaagtgctgcaaagtgcggtggtcagtataaacctcacaagacacctcatataagtaatgcctccaaatcttaagagcatgaacaattgcggccaactccaaatcatgcacaaggtagttcttctcatggggattcagctgacgtgaaacatatgcaataacttgcccctcatgcatcaatacacatctcaagtcaacgcgtgaaacgtcgcaataaacagtatacatccccgaactagacgagaacactagaactggtgttgtggtcaaaactatattgagcttttgaaagctcgcctcacactcatcagcccatcgagacagagcacccttctcggtcaatctagtcaaaggtgctgcaatggataaaaatccctccacaaaccggcgataataacctgccaaccccaagaaactcctgatctcgatcgctgaagtaggacgatgccaattctgaactgactcaatcttcttgggttccactttaataccctctcctgatacaacatgccccaagaacgccacaaaatccaaccaaaactcacacttggagaacttagcatacaacttatgttcccgcaaagtctggagcactactctcaaatgctgctcgtgctcccccaggctacgtgagttaaatcaagatgtcatcaatgaagacaataacaaaagaatcaatataaggcctaaacacccggttcatcaaatcaataaatgacgttggggcattagtcaagctgagggacatcactagaaactcagagtgaccatatctagtacagaaggcaatcttcggaacatctgagtttcggatcttcaaatgatggtaccttgatctcaagtcgatcttagagaacatcttagcaccctgcaactggtcaatcaaatcattaatacgagtcaacgagtactttctcttgatggtactttgttctagtgtcggtaatcaatgcacatctacataatcctatccttcttcttcacaaataatactggtgcacccaaggtgatacactcggtctgacaaaccctttgctagcaaatcctcaagttgttatttcaactccttcaattcttttggagccatacggtacagtggaatagatataggctgggtgtctagagccaagtccagaaatcaatatcacgatatggtggcatgcctggaaggtcagaaggaaacacatcagcgaactcccggactactggcactgaatcaatcattggagactctgcggtagtgtcccgaacataggctagataagccaagaaacccttgtcgaccatatgtcgagccttcaggaaagagataacttgactggatgtactgatagatgaacctttccactccaacatgggcaactctggcatctctaaaataacagtcttggcatggcaatcaagaatggtgtgatatggagataaccaatccatgcccaggatgacctcaaagtcattcatatcaagtaacaaaaggtcttcgctagtatcgtagccacaaaatgtgaccacacaggaccagtagatccgatccaaaaccatagaatcgcccacatgagtggacacataacaagagtacccaaggactcatgaggaatatccaggaagtgagcaaacagaaatgatacatatgaataggtggaccctggatcaaataacaccgaagcatccttaccgcagacagaaatggtacctgtgatcacgacatctgaggccactacatctggtttggccggaaaatcatagaacctagctagagagtaggctggatggcctccacctgacttcccttacctataggatgacctctacctgcctgccctctacctgtctgccctccgcctctgggcggctggacagctgactcgactgatggagctgaaattgtgggctgctgaccctgctgcactacctttccccgaagtctggggaggtcctcttcatgtgatccggatctccgcaatcgtaacaacctctcgataccatagattgttgcccaaaattctgacactgattacctgaagacccacatgaaggaccctgaattgcaggtggacggtatgaactctctggcatggcactgaaataagcactggaagaaccctgatgaccagaatacccgccggaagaaccctaaatagctggtgagcggtaagaactctccggcatcacactaaaataaggcctcactagagcacctcgaggaggtggcggtgatactgaatatgggtgtatgctgggctgtcctttcccaaactgagctctacccctagccgggggacctcgaaactctccatagaagtagtccctcttgtcctcctgtatatcctatctacccctctgacggtagccctcgatcctccgagcaatctccactaccagctgataaggagtccccatctcaacctcctgggtcatattgaccctaatactggagtgcaaccctgcaataaacctctgcactctctctgcgtctgtaggaagtatcataagtgcatggcgagacaactcagaaaacctcgcctcataatcagtcactgacatctgaccctgctctagctgctcaaaactaatatcgcaactcttccctctcagagggtgggatatatctatccaagaaaagctgtgtgaactggccccaagtcaaaggaggagaacctgtcgatctgccaagaaggtaggactgccaccatctatgggccctgccctctagatggaaagtagcgaagtccaccccatgggactctatatcctcatgttgtgcagtctgtcccagcacctatcaataaagtcatggatgtcctcatgactctcacctccaaagactggagggtgtagtctagtccatctatccaatagcttttgcggctcaccatccgcagttggtctcatgcacaactactgcaactggttgggccccctccgcgggtagtgtacccggagtatgatacactatagctgcatgctgaagaacctgagtagtaggggtctgtgctccccatcccgcctgagatgtggttgggtctgctggaaataaaccagcatgggtcataaaatccataaaccgcagcatacgacccatgacctcctgaaagcccggtgctgttatgaaatctactagggttggctctgttgcgggcacctcaccttgctcctcgacaataggatcctccactgaatccgctagaggtgctaccggggaaactctaggacgccctcgtcccctacctcgggcccgttccctaccccgacctcagcctcggcctccaacaacaggggggagtagctcctcttaggtctggaacgtttgatgcgtgtgttctcaccacctgtgagaaaatagaaggaagaacttagtatatgtcacgacccaatttccaaccttagggatcgtgatgacgcctaacaccacacttgctagacaagccaatgttagaatccctatgacaaatttccttcaatttcttactcaaacataagtaacttgatttaaaagcaatctaaaatatcataacctccaccaatccattaacagagtaataaaatagtaaaaatcctctagatgaaatgaactacgaactacttgtgaaataaactctatgactacctagggtctggtgtcacaatccacaaacgactagagaatactgcaaataatgcctaaaagaagtagtgtagctgttcgaaatgatatgaaacaatatatataaatgtaggagaagactctcggatatctgcgaacgccggtagatgtacctcgtgtctctaaacgaagtcaggtgccggcctagaatcctctaccactgaaagacacctggatctatgcaaaaagagcacagagtgtagtatcggtacaatcgacctcatgtactgagtaagtgccgagcctaacctcgacgaagtagtgacgagtctaagtcgggcttcaacaatataatctttaacaacggtaaataatgagcaagaaagaaatctgacaatttactaatcaattattgaaaacgaataaaataaaacaattcacctataaccaattctccaacatctattcagagttccaaactttaactttgaatcataatgtactaaaatatttaaagagtagtaaaacaaacgtttcaacttttcaaacctttatttcctttttctttgcaaacatcaaaacaataataatgtaagtatccccccttatcaaagtcacacatatatttatttctcctgtccacctttatcacagtcatatatatttattttctcctgtccacccttatcacagtcgtatatatttatttctcctgtccacccttatcacaatcatatatatatttctcctgtccacccttatcacagtcgtgtatatttatttctcctgtccacccttatcacagtcatatatatattcatttctaactttcatgattcaggccaagcctttcacaatacctttgtttcaacaatatataaataataaactgcatgtttctcatgacttcatcaataattctctcaaccaggaaaccaacaagaatatccaaagatatacatcattccataaacaataacaaatcactcagccatattcatatcacaagggaaaccaactcaaacaaccaatattcttccaaataggcacaacaataacaaacaacaatttaccaaggccaaatagtcattgaaacaattgtaaccatctaacagttaagacaatgatcaaataagtagggaatgagaaaggggatcatgcttcatttgggtggtgcatagatactcatcaccacacctatacaccacactcatgcaatccacgtagcaaacaagtggggagtcctattccctcaagataaagttaggccaaacacttacctcgatgccacaaacccaattcaagcctcaactactgccttaccccttggttccaccaccaactcgctcgtatctagtcacaagttacttaattatatcaataaatgctaaatgaatgaattctaatgcatggaaaagagttttctagagttttccccaaaattcacaaattgaccccggccgcttggtctaaatccgaagttcggaccaaaacccgattacacattcatcccccgagccccggtgtatgattgttttggaatccgaccccaattgaggtctaaattcccaaacttcaatgttcttaggttttcccccaaattcccaattttcccatgaaaatccctagattctaagatgaatcttgtaaaaagatgttaaggaataaagaaaactagttagaaataacttacaattattttggagaagaaagagtgtttagaaaatcgcctattgtgtttttagggttttgaaaaatagaaaatactgaaaaatccagttttatataggcacccctctcacgcctccaccgcggaccgcggccgcgagggccttgtgctgcttctctgaagttcttccaccgcggaccgcgataaggcgaccgcggccacgactgcgaaggagccaccgcggaccgcgctagggcgaccgcgaccacgcccacaggttcagagacctgactccccctacctgcaacagtcaatgattttaatcctattgcatcgggacctacccgaaactatcccgagccctcggaacctcgaaacaaaagtgcacacaaccttaaaaatatattacggatttattcaagcaatcaaaacatcgaatcattaccataaacatcgaattatacctcgaattatatgaaatttctcaacacttctcaaacttcacatttttttccacttttagttcgaatcacatcaaaatctaatccgtttctcaccaaattccacagatcattcatatcaaacatattggacttgttccgggttccggaaccataatacggtaaggctggcaggtgggccggacgcgacctgggatcgacccgggcccacgggccagcctccggggggtccgggtcttcattttcgacccttgagctcgggcccgacaggcgggactgggccgggccaagcaggcccaacggtaaaaattcaaaaataaaatggccaacggccagatttttaaaatctagccatttgagcctcaaaagagccgtttggaaagtttaaaaaatagccaaatggcccccaaactttgttttaaacccaaactttttataattacactttttccctttctcaagtataaataccccctcattattttatttttactcacaaaatcatcaatctctctcaacctctctctaattttcttctattattacttactttattattgcaaattgtgaaaaattgtgaagttggtgaattgaagtattcaagtcttcaacattatacaattttcaagaagttgttcgtcaattcggtaaactcattccaactcttaagttttgtttgtttaatttgttttccttataattaatatggacttttctttgaaaaaaatatttggtggtaagggtacatctaaaattggtgaatctagtaggcaagctactattactcccccggctccccgacgtagacatgttacccgtcctcccccacctattattcttgataatgataacccttgttttcaatttaccgatagtcagtttatacatgatcttacaccaggttcacaattaaatgatgaacatatgaattctctttatggtaatccacctatctatgaaaatgatgaggaaaatgatgatttagatgaaactcaacccgatttagatgatacacctactacaactgttattaaccaaactgataataatccaaatgatgccccgaatgaccctcctgtagtaacccctacttttaatagacaacgtggtaaacgagccgaaacatctcttgtttgacatttttttactcaactaaaagatcaaaataaggctaagtgtaaaacttgtggcctcttgatgtctcataaatttaatgaccaccgtgggggtacgggtagtttgactagacacatactgaaacaccctgatgctaaaattaaatttcaacaaatgaaagctcagcaagaggggacaagtgtaggtactcaggttaaccctagtaccggatcaaatctaattcaaccgggaattaacattgttaccggtgacattttatattacgatccaaataaagatcgtgaagaattagcaaaaatggttactgttatgtgcttcccatatagtttttcctctaaccctcactttgtccattatattagaagaagttttaatcctacttataaaggatggcctcgcacaaccgtaaagtatggtatttataaatataaacatgaatttgaacaatatttgcgctatttatttactcatattagtaatcacatttctattactactgatattggtaagagtggtaatgactgtgattatttaactgttaccactcattgggttgatgaggaatggataatgcaaaagtgcattattgcttatagaataattacttctagtcacacaggtaagtttattgctaagacagttcatgatatttgtagatatttttgcattacagataaaataatggcagtttcaatggataatgcttctagtaacactaatgctataggctatcttacaactacactaagtcctgcatttagtaatattttccatgttagatgtatttgtcatatttaccatttaatcgtcggtgatggtttgaaaactttaaatgctgaaattgcaaaggttaaattcgctcttcattggcttttttatgcaaaccgtagaagtagagttagagaatattataaaaaatgtgatgaatttggccttagagaaagaaaggttcctaaaccttgtccgactagatggaattacttgtatgaaagtttagttgttgcatatgaatatagaaacccaataagcgcaacgtataatgctcgtgttggtggtgatgatgatgatgatcaccttacaaatcaagattgggctaatgttaaaattcttctagattttttagaacattttcatgttgctacaaatgaattatctgggcaatattatgctactattctaactgtttagtttatatttcagcacttgcagaattatttactcaattttcagagggtgggatagtttaccaaaatgctattagtgatatgaaaattaagtttaaaaaatattttttccctatccccctctttatggtattgcagccatgttaaatccctaccatgaaattaggaggtcctcactattggtatagtactatttataatgctttacctctttcacctgaggaatttggtacacttaaagatgaaaaatagtcaattaaaataaattctcaaacaatttataatgcttaccaagtagcattagatcatgctaaaccaaatgttccaactcctacctcgtctagctcgcaggttcctaaaagatctgcggggctaaaagcacttagttgttggacggggttcaggggttctcaaggtgataatattggtgatagttcacaactaaatgagcttcaagtttatttgtcgcagggacttgaatcagagaatccagatggcaccttcaacgttttggaatggtggaaggacaaagaaaaatactttccggttctttcaaggatggatcgagatattttaagtattcaagcttcaaaagtggcatcggagagcgctttcagccaagtgagacttcaaatcggtgatcatagagcgtctatgagggagagcttagaaaaatcagtactcttcagagattggatccggtcggaaagaagaaattttggacttgctgaatcacaacaggatatagacgaagcttatgaagaaatgctagcggaacttgcggaggatgctgcttcgcccggaagctgtgatgaacaagcttcttttccgccaccaccaacggaaattcctcccaaccttgaaggatttataaaatttgttagagatactatgtagattaatatgtaacttgtattttgacacatcttgattagttttttcccttttaatggtggtattagtaccttagatgtgttcattccattggggggaggaagactaagaaagatattgtcatttttttaaatgtcatattaataaaaattataagacatttccttgaatatctgtgtttaacttggattacaatacataagtcataattatataatataatttacaataaattgccttatataatataatataattacacaacaaaatttttgtaactctagaatcacacttatataatataatttacaataagtgcaagtttgaatatctctttactattttttgtgtgtttaaacttgaattacaagacataagtcataattatataatataatttacaataaattgccttagataatataatataaatacattaaaaaaaatttaatagccaacggctatatttcaaaaactagctgtttggcatgtttaaaaaatagccatttggcccccaaactttgttttaaccccaagctttttataattacacttttttcctattctcaactataaataccccctcattctttaatttttactcacaaaatcatcaatctctctctactcaaattctcaattcaagttaaatcatgccctgtggttctagaattaccccatttgttcgggaacattataatttagtagaagaaaatgaagaaacttacacgatattgtgcaagcactgcggttttgtctacactcggcgaaagatggagggctcaggccctttaaagaggcatataaccaagtcctgtccagcgcgtcctcaagacattcatatctaatattttaagtttaattcaaacttgtgttattttaattattagtcgtattatgcttaatgttgtagtttgttaaattaatttgatgtactattaatttattatgcaatgttagtgcaagtttaaagtactattattattaatttgaagaaacttacttgaattacaatacataagtaataattatataatataatttataataagtgcaagtttgaatatatctttactatttttttgtgtgtttaaacttgaattataagacataagtcataattatataatataatttacaataaatagccttagataatataatataaatacataaaaaatagccaacgactataatttcaaaaactagccgtttggaaagtttaaaaaatagccatatatcccccaaactttttataattacactttcccccttttctcactataaataccccctcattctttcattattactcacaaaatcatcaatctctctctactcaaattctcaattcaagttaaatcatgcccgatggttttagaaataacccatttattcgggaacactataatgtggtagaagaaaatgaagagttttacatagtaaagtgcaagcactgtggtcgtgtctacactttgcgtccaaagttgaccggcacgggctctttaaggaggcatataataaagagttgtcttaggcgttctcaagatatttgtaatgttatagtttcttaatttaatttgaagtactattaatttattatgcaatattagtgcaagtttaaagtactattattattaatttgaagaaacttactattttttgtgtttaaatatgaattacaatatttatatcacaaagatttacaagaaattgccttacataattttttttttaaaaaaatagcccggacccgtttaggcccgcttagcctgggctcatgtgggcttaggctcgtagggggccggttccacctatatagcccgtttggcccgggcccatttagcccggcccacttggcccgtttggcccgagcccgacccgttagccacccttataatacgggccccaaataaacagatttccatcaaatttcgttttcaaaagccttcatatttttttcagagaacaaattttctttaaaatttcatttctcggacttgggatctcggaatccgattcggggcatacgtccaagtctcatatttcctacggaccctccgggaccgtcaaaccgcgggtccgggtccgttaaccgaaaatgttgaccaaagtcaactctattcaaataattattacaaattcattattttgtcaattttccacataaaggcttcccggctacgcgcccgggctgcgctcgcacatcaacgtgagataagaggaggctttcacggcctcggaacacagacttagctaaaattacacgggatgacctttcgggtcgtcacaatctccacctctaaaacaaacgttcgtcctcgaatggacatatagatatacccggatcagggaaaagatagggatatcgactccgcatatcagattcagactcccaagtcgctgcctcaacaggctgacctctcaactgaacacgaaccgaaggataactcttcgatctcaactgacgatcctgccggtccaaaatagctaccggctcctcctcataagtcaagtctttgtccaactagacagagctgaaatctaacacgtgggacgagtcaccatgatatttccggagcatagacacatagaatactggatgaactgaggataaccctggaggtaatgcaagcctgtaagctacctcccccaccttatcaagaatctcaaacgacccaatatacctagggctcaacttacccttcttcccaaatatcataacacccttcatgggcgacacacgaagaagtactctctctccaaccatgaatgctacatcacgaaccttacgatcggcataactctttttcctagactgagttgtgaaagtctcttctaaataatcttgaccttatctatggcctcttgaactaagtctgtacccaacaatcgagcctcccctagctcaaaccatccaactggcgatctgcaccgcctaccatataacgcttcataaggagtcatctgaatgctcgactgataactattattataagcaaactacactaacgacaataaccaatcccatgtacctccaaaatcaataacgcaagcacggagtatgtcctccaatatatgaatggtacgctcggactgcccgtcagtctgagggtgaaattttgtgctgagatcaatctgggtacccaactcactatgcaatgctctccagaagtgtgaggtgaactgaggacatcgatctgatatgaaggacacaggcacaccgtgcaacccgactatctcacgaatatacaactcatccaaccgctctgaagtgtaagtactagccactgggatgaagtgtgctgacttagtcagcctatctacaataacccaaaccgcatcgaacttcctctgagtctgtgggagcccaaccaagaagtccatagtgatacgctcccacttccactcaggaatctttatctgctgaagcaaaccactaggtatttgttgctcatactttacctgctgacaatttaagcaacgagccacgtaagacacaatgtcttttttcatccttctccaccaataatgctgtttcaaatcttggtacattttcgctgcacctgggtgaatagaatacttggaactatgagcctcttcaaggatcaacttacggaggccatcaacattaggcacacacagcctaccctgcatcctcaaaatgccatcatctccaactgtaacctgcttggaatcatggtgtcgaaccttgtctctaaggaccgccaaatgtcggtcatcatcatgccgctctcggatatgatcaattagtgaagaccgagcaacagtacaagctagaacactgctgggagaaatatctaacctcacgaactgattagccaaggtctgaatgtctgaagccaacaatctctcgccgaatgggatatacgcaagactgcccatactcactgcccttctactcaatgcatcggccaccacattggccttccccgggtgatacaatatagtgacatcataatcttttaacaactctaaccacccccgctgccttaaatttagatatttctacttgaataagtactggaggctacgatggtcagtaaaaatctcacacgacacaccataaagataatacctccaaattttcaaagcatgcacaatagctgccaactctaaatcatgaacagagtaaatcttctcatgcactttcaactgacgagatgcatacgcaatcaccctgccgtcctgcatcaacactgctccaagaccaactctagaagcatcacaatacaccgtgaaagaacccgaatatgatggtaacaccaacaccggtgctgaagtcaatgttgtcttgagattctaaaagctcgcctcacactcatctgaccatttaaacggggcacctttctgagtcaacttagtcattggggctgctatggacgaaaacccctccacaaaacgacggtagtaaccggccaaacccaagaagctcctaatctccgtggttttggtgggtctaggccagttcttgactgcctctactttcttaggatcaaactgaataccctcagctgatacggtatgatccaaaaaggctactgaatctaaccaaaactcacatttagaaaacttggcatacaactgattatccctcaaagtctggagtgctatacggagatgctgctcatgctcctcccgacggcgagagtatataagaatgttataaatgaacaaaatcacaaaagagtccagttgtggcttgaaaacccgattcattaagtccataaaggccgctggagcattagttagcccaaaagacataaccaaaaattcatagtgcccatacctcgtacgaaaggctatcttagggatatcggacgccctaatcttcaactgatggtagcctgacctcaaatcaattttcgaaaacactctagcaccctgaagctggtcaaatagatcatcaatccttggcaacagatatttatttttgatagtaactttattcagtttcctgtagtctatgcacattctcattgacccatcttttttctttacaaacaaaaccggtgcaccccaaggtgagacactggctcttatgaaacccttatctacaaaatcttgcaactgttcctttaactctttcaattctggtggggccatccgatatggatgaatggaaatcggctgagtgcccggagccacatcgatacaaaaatcaatatccctgtcgggcggcatacccggcaggtctgaaggaaatacctcaggaaattcacgcatgatagaaattgactctataaaagaaacctcaacatcagaatcacgaatatgagccaaataatccaaataccctttctccaccatgcgacgagccttggcatatgaaattactcggctgggagaatactaggaatccctttccattctaatcgaggcaatcccggtagggctaaagtaactattttggcatgacagtctaaaatggcataatagggcgacaaccaatccatgcccaatataatatcaaagtcaaccatgtctagaagtaaaagatcaacactagtttcaaaacctttaatgactaccacacacgaacgatatactcgatctaccatgttggctcatgtcactgaatgggttttgaagattgacaagttgaaccaagtccatcagagcacacacatctgaacggaacagttggcacaagaagcattcatgcatatgatatttgctgagtatcaaagagctaaaaggatgtctcctaatacgaaaaggttgcaaactgataaagaagattgaagttgatttcagcaaggacagaaataaagaaggaagttgagtcatagtcgaactcgtatacccaggtagagttggatcagaattgaaccatgtactcaacaactgactctataaatactcaatgtattactgctgaaattcttaacgcacaaagacaaaagtgaatcgagttctgaaaagaaaagttcccaggatattttgcaagcagaagtattgtgcgaaggctacagttcaactagaagaaaaagtttcatcgtctgagtgttaagtctagttgatgtatcttttcagtttcatagaagcaattgtaatagatacacattgttcaagttagagttagcttgaaatctgtagaaattagctagaggctatttgatacaaagaggattagagttagtcctaggattacaaaagagtttattttgtaagtccgtttggctcagagtttttagtgaagtgtttgagcaaatcctattgaggagtaggtcatgttttttacaccttttgagccaggtgttttccatgtaaaaatccccgtgtctttactttactgctttattattccgcagcaatagaaagtattacaccaacatcactcgaaaattgggtactgcacaattaactaatattattgtgtagtattgacgtctaaaacatcaattggtatcatagaaggttatccttgaagaggctaacaccttggaaaagatcaagatgagtgcaccacctgggaactaggaaggtcaatcaactgcaaggccaccactcttcaatgttcagtactattcttggtggaaaaataaaatagaatgaaggactatattattggagaggactgtgaactatgggacatagtcactgatggaccccttgcaacaacgaagaagactactgaaggtgtagatgtacctaagactagggctgactgcacgactgaagatttaaagaaatgggagaagaatgccaaggccaagaagtggctagtatatggactaggtcctgatgaatacagtagaatccaaagctgcacaacaaccaaggaaatctgggacactttacaagtagcccatgaaggaacacctcaagtaaaaaggtctatagatacactactatactctcagtatgaaaacttcactatgaaagaaggagagactattcaggagatgtacacaaggtttacaaccttgaccaatgaactcaagtctcttggaagaatcatactttaagaagacaaggtagagaagatcttgacaagggttctgcctatctcctgggaaagcaagatcactgctatccaggaatccaaaaatatggcaactcttagactagatgagctaattggaaatctcactgcttatgaactcagaaggcaaaacatgaagatgaatgccccaaataaggagagaagtctagcactgaggatcactgaaggagcagatctggaggaggatgagatggccatgatcaccatagaatttagaaactttctcatgaggaagaagagcatctctaggggagtaaacttcaacaaggcaaaggcaccagaaaggccagctaatgagggatgctacaagtgtggaaaaactgaccatctcatcaaaaactgtcctcagtgggaagtataatggaggaaggagatatatgaaagaaagaacaggaagaaggaactggtccaacccaagaaaaccactacaaagtctatggttgctgcttgggggggaagttcagatgaagaatcagaagatggtgagacagaagatcaggctctcatggcaattggagaatctgatgaggatacttatgaagaacctgaggtaagtatctcacaacttaaaactaaaataaagtttttatctaaggagaaactctctgagttgctacttgacttcatagatgattctgaggaaacaaccaaagagaagtatcaactatctaaagagtgtgaaatgctaaaagcaaaatgcatggacctggaaataagggtcagtggatctgaaaagaaaaacactctcttgatgaaccaggtccatccacttgaaactgaaatcctagaactaaaatctgaaaacttaaagtaaagactaggatccagtaaaaaggtggttgatcactctcatgcaatgttataagaagacttaggaaaactaaaggacaaaatgtatgccaaggatgaacatataaaaactcttaaagaagagcttggcaaagtcaaacatgaatttgatagaacacgcaaatggaataagtcttctgatgcattaacttggctccaagagaatcacagtagcaaccagagagggcttggttttgggagtcaattgcctaagtgggatcccaaaagcaagtatctcactctccttgaaaataaaatttgcacccattgtgggaacactggacactataaatatgagtgtgttgtaagagcaggccagtcagaaaaataagagattcattaaaaagaagaactggctaccaaacttggccggagaaaatctgattcatccattctctcatagaaaaagacccaaactagtttgggctcttaaaactacccctgatttccttttgtaggtacaagtgaagggaagcaggctaatttggtttctggatagtggctgctctaagcatatgacaggaaacaaggaacaatacgtttcacttgaaaacctcaaaggaggaaatgtctcctttggaaacggaaagaaaggtgaaattataggggtcaacaaggtaggtaaagatgacatacgttcaattgaacacgtgtacctgatagatggcttgaaatatagcctaatcagtgtgtcacaactgtgtgacagaggtaaccttgtcgcttttactttcacaacatgttttctgatcaagctgcttactgacaagattattttgcagggaaagataatgaacaatatctatgtcattgacttgtccacactgtctgacaatgaactcacttgccttagtgtgttggacagtgatccccacctgtggcacaaaagacttggtcatgcaagtctgactcagcttaacaatctagtctctaaggacttagtggtaggactctctaacattaagttcaaggaagacaaagtttgtgaggcatgtgcaaggaggaagaaggtaagatcttctttcaaaagtaagaaaattgccagtaccaccaggacgttggaactggttcatatggatctatgtggtcctctgagaactctgagcagaggtgggaagagatatgtgatggtgctagtagatgataattcaaggttcacttggaccttattcctggcatttaaggatgaagcatttgatatgttcatctcatttgtcaagaagatccaaaatcagttaggacatcaactagcatccataagatctgaccatggtactgagtttgagaatgctaagtttgctgagttctttgacgaacatggtgttagtcacaattgttctgctcctagaaccccacaacaaaatggggttgttgaaagaaaagacagaactcttgaagacatggcaagaaccatgcttctatcaagcaaactacctcacagcttcttggcagaagcaataaacactgcatgctacattatcatagatgcatgaccagacctctggtaaagaaaaatccttatgaattacttaaagggagaaagaccaacatatcccatcttaggtcttttggatgcaagtgttaggtgaataataatggcaaagattctctaggaaaagtttatcccagaagtgatgagggagtgttcttgggatactcaacacatagcaaagcttattaaatatacaataaaagaaatatgtgtgtagaagaaagtgtacatgttgtctttgatgaaactaacactctttctaagagacaggaaccagaagacgaggagcttggaatggtaaggagcaatgaccacattgaagcacctatggcagatggaacaggtgatggacaagatccaacaaccccacgcaactcgacagggggaattctacatgaaaatcctggccctgatcctgttccacaactacaagacaacatggaacaatccagaagtgaacaactggtactcaagccacacagatatcagagttctcaccctcttgagaacatcataacagacttgagatctggaatgaaaactagatcctccttgaaaaatctgtgtgcgtttgatgcatttctatccttgactgaaccaaagaatattgctgaagccctgcaagatgctgactgggtaaccgccatgcaagaagagctgaatcaatttgagaagagtcaggtatggcacttagtacccatgccactagacagatctttaattgacaccaagtgggtgttcaggaacaagctcgatgaggatggaactattacaagaaataaggcaagactggttgttcaaggatacaaccaagaataaggaattggctattatgagacctttactcctgtggcaagattggaggcaataagacttcttatagcatttgctgcacacatggaattcactctccatcagatggatgtcaagagtgcctttctcaatggtgatatctaaggaagatgtatttgtaaaacagcctcctggctttgaaagcaaagagtcacctgatcatgtatataaacttgacaaggctctctatggtctcaagcaagcacctagagcttggtacaagagattgtcaaattttttgttggaacatgggtacaaacgaggcaaaatagatagtactttgtttctaaaagaaaagggaaaggatcttatgattgtgcaaatatatgttgatgatatcatatttggggcaactactgataagcttagcaaggaatttgctacattaatggggagtgagtttgaaatgagtatgatgggtgagctaaccttcttcttaagcttacagatcaagcaaactccacatggtacaatgattcatcaacagaagtatgtgaaagaactcctcaagaagttcaaaatggaggactcaaaggagatagacacccaatagccacaactacaaaattggatgtggatgaacctggttcatccgttgatcaaaagacatacagaggaatgattgggtctctactctatcttactgcaagtagacctgatatcgtgttcagtgtgggactatgtgctaggtttcaagacaatccaaaggagtcccaccccactgcagtaaaaagaattttgagatatctgaagggcaccactgatttgtgcctttggtatcctaaatgtagtaattttgaccttgtaggatatgctgatgctgattatgcaggtttcctggttgacaggaaaattacttcaggcatggctcactttttggggtccttccttgtctcttgggcctccaagaaacaaaattcagtagtcttgtctactgttgaggctgaatatgtggctgcagcctcttgctgtgcccatttgctttggatcaagcaacaactcatggactttggtatagatgtgggatgcattcctatttactgtgataacactagtgaaattagtatgactaagaacccggttcatcacaagagaactaagcacatagatgttaggcaccattttccgagggacatctatgaaaaaggaatgatctcaatcgaattctgtgctactgatcgacaaattgctgatacattcaccaaagcactaagtagggagaattatgagagaaacatgcttgaattagggatgattaagatcacctaattgaaaaaaaaactgaattttttttggctagaaaattcaaattaggtacttattcaaattaatcattgctcagtattatgtctttattgccatactcttctgccatgtattaatatgattctctagttgctaatgatgtttctatatttttgtaaattaaggcaaataaagaattttacctggatgaacctggttcatccatgctggttcatataactgacaaggtacgttctcatctccatacacgtattaattcaagtacagttatacatgagcaagactctatccatttatggttcaaattcaaattctcgtacttacccaaataatgaaccagtttcaagaagtcccgtctcaattaattagcctagttttagggggaaagtaactgtctaatcaatgtctaatcgctgacagaccttaatcgattagtatcccacttgagttaatactctttcgttgtaatctccccagccataagttataaaaaggccatcattacccattgtgcataaagcaacagtcgaaccttgttcaacttacaatctctactgcctcttgtctttcttatctctaaacaattcaaaatcatgtcgtcacctccaccagtttcttctgattcatctccaaacagagattatgatggaggaaactatgaatcagactcaaattcgccctcagtgtatagttccgagtctccagaaaagtcgtcaaccccagaacaccctactatcccagaacccacaccaaaccctaccccaacccctaagcctcgtcatgtaaaagttcttgcacacaaatctgtgtcttctagttctagagccaaattcttggaagaattattgcatgctgaagaaggatccaaaccagaatcatccaatgtcgcatttgcgacaccaggttcgcaaatgcaacaaaagcctcacaaatgcaaagactgggcttcaacggttggggctaacaaatgagaccaatgagtcgcaaaagcgacttctgctggcatcgcatatgcagcttaagtgtcgcaaattcgaacactgcatgggtcgggctccttcgcaattgcgaagccctcatcgcaaatgcgaggttcgcatttgcgagatccgttgcagttgccaaggacaccagaaatctggtatgttttcaaccccttccacacatccgaaactcacccgagccctcgggacttcacaccgaattctcacaagagtctaacaatatcatacaaacttactcgcgcgattggaacacctaaataatgtcaaaaactaagaatcaccacccaaaaccattgaatcaaactttagaacttcaagttctcttcacttccaatgcaccgaaacgtacttaaactactcggaatgccaccaaattttgcgtgcaagtcttaaatgacattacagaactattcccgatctaggaattttgtttggatctcgatatcaccaaaatgcgttccaaaccaaatttatagaacttctaaaaccttccagaaccaactttcactatcgagcgcctaacaccacacttgccaggcaagccaaatgttagagggattcaatatttaaaacaattaaaatataattctaggtctaaaattatcaaataaaagaataccaaataatgtgaggaataataaaatgaaattcgaagctaattataatatatagttaccctgttttggagtcacaattcacgaactactaaagaatactacaagtaatttgcgcaagaactaaataatgtagagaagactccaggaaatctgcggacgccagtagatctacctcgcgtctccgtgcgaatagactcagctcggacctaaacttggatctgcacaagaagtgcatagtgcaatatcagtacaactgaccccatgtactggtaagtatcgagcctaacctcggcgaagtagtgacgaggctaggaccagacaccacataaaccctggacatatataatcatgctagcagtaataacatcaattacggaattaaaaacatcaaataataggaagggagcatgcaatggggaattttttcacataaggaaggaggaaaacaataagacataattaaacaatgatcaacaatgattttagaaattaaaaatagaaaggtaacttgtacgacatcacccttcgtacttttactcccagcctcaccaaataataaatagaatgcacaccatcacccttcatgcttttactctcaacctcaccatacaatgactaagaatgcacgacatcacccttcgtgattttactctcatcctcaccagattataaataagaatgcatggcatcacctttcatgctttacactctacctcacaatataaataatgatgaatcatgcatgacatcaccctttgtgcttttacactcttcttcaccaatcacagaatcattaacatcatacaaagagggatttcacaagaaatcaatatttcatcatagtttctatcatcatttatcatttcaatatcaaatcaatattcaaaatattatccatctcggtggaatcggatacttatattccaacatttcactaacaacaataatcacagatgataggctttaagacaaccaaaataacaagaattagcattcactcgcatggtatgatctgaccataatgtataggtactcgtcacctatacatcgtatttagcaacaaaataagtagcaagtattcacacaacacctattccccttaagctaaggttagacacaacacttacctcaattctacaggccactcactgctcaagtataattttcttttataattcacctccaacccactcatatctaatcataattagttcaatattattaattattgctaaaggaattaactttaatgcataatcatggttttcctaagttttcccaaaaaaggttaaaaaccgaccccgggctatcttggtccactcgaggtttagaccataatcctattacccattcaccgccgatcctaagtatgcaattagtttcgaaatccgacctcaattcgaggtcaaatttgatatttacaacattctctaattctacccaaacccccaatttttaacatgaaaacccttgatttttgattgataagtgatgaaaaacattgggtaatcgaaagagaatagtttagaatagtttaccaatactttagggatgaacttgtgggttgaaaatcgcctctaggtctttttagttcgaaaatatgaagaaaataggttttgcctatttttggttctattattatatcgctggacaagccttcatcgcgttcgcgatgggcctaccgcgatcgaagagaacaatggcccagtggccttcgcgtgggaacgaacgcgttcgcgtagctttactcttgatggccatcacgatcgtggcccaacatacgcgttcacatagaagaaatagagccccctcccccaggcccattactcaccgcgttcgcgatagcctggctgcgtttgcgaagggtaatccctccaatgcttggcgttcgcggctgatgaatggtgattctaccactcgttttagcttcttttcgttagattttgcgtctttcaatgataacatgaggtcgtttatagtgtttattgctcgaatttcagggaaatgatgccatgaagtgattggcgttgaattgaagtggagttgagcacaaattggtgaaaagagcacaaaaaccttcagtgattccgcacctgcggatgtttggtcgttggtgcgacatcgcacctgcgcaactggctcaagtgtacactggccgcacctgcggaactgcaggtgccgtatttggtccgcatctgtgtaaattgtcagcccactcaaatcgcgcacctacgttatggaattcgcatatgcggagccgtacctgcgagaatttgtccacatgtgcggtcaacgggcatcagacatggacataattgtaaaataacattttctcattcccaacccacatatactcgacctagcatatattttttgtatctttgttaatgtttaagctcatttttagtagagaagagtagagaacacatttgtggaagctagggtttgcacacacacttgggttttgaagatttcaagcttgtggttaagattttcttacccatttatgtttatttcttcattttcttgctttgtattgaatatttaagtgtgtagtatttatttccaacacttgaatcttgtttatggaaatattcatatttaaagtgtggattaaataccttgttgtgcttatgtattgaatgatttttagttatttatgaagtgagttattgtttatttaattattcttgttctttgatgtttccaaagggattatctaaccctaggactcgcccattaacgccaaattaattttggaaaagataatttggggttgggaaagattaattaacaagaacttgcggctttaaccctcattttatagattctacctaagaataggattgaactacttgcagacatatccgggtgtgattaatctcttaattgggttaggaatgattcaattaggcagtcttattagtctttggtaaaagctaactaagaattattatccgtggctaattaacataaactcgctcatatttgtaaaatcataaaatacattggatcgttacttgagtgtaattcccgatgcattcattcttgtagacattgatcatcttacttgctttctaggttagtttgtatttttgcatttagtataaacattatcaaaatctaagtgtttggcactgcgcgataagtgataatcctcttacattcctaatcgcctccatattgttctctgtgggattcgaccccaacctagttgggttattatatttgacatcgaccgctttgcactagtttaaagtgtaaatttgagcgtatcaaattttggcaccgttgccggggaacaatttggcgtaatttaggttgtttgagaaataagtataagtgctttggtccaaacttgtgaatatctgtgtaattatttttcttaccttggtttatttttcttgtttgtttcttttttagtttcttaagttctggaaaacaaaatggcatcatataatgagaattggtcggatggtagttgttcatacttagatgacccttgtccttattgtggaggaccacactcgtggcaaaattgtttaaattctcctggggatggattgtgcgcacaatctcaaacccatgagttgagtatttgtgataggtgtggttgccaaaatggtcattggtatgattgtgtatatttgtccgtcccttccccaagcccccgctacgatgattctactttttgtgatgaaaattctaggggtgaagaagtggaggaaattgagcatggtcgaaatggagagttcaagcttatgttggagtgcttacttgaagaaggaaaccaagagcaaagtaccttggaggagcttttggagaataacctccaaaatgaattggcacttgaaaggttgcactcacatatggatgaaatgattgaagccttaagggttcaaaaggcattggaggtgagtaatagccaagaaccttcctgggaggttgaagttgaaaatccttccttggcacttgatcaaaaccaagaagaactctcaaatgctcgaaatgagaggatgatgctcatgttggaggccattcttgaaaatgaggaaaaacacaactttgcactcgaggacttgaaacatgaagtgactcaaaatgatgagcacatccgcactttggaggatcaaatgcaagcattgatgaaggctcattatgcctctcaagttgaaagtgtggatggaagccaagaagagtccaattccgaggaagaaagtgagctttacgttgaggaatcaagacttgaacatctgccaaccgactccatgagtgtttgtgatgccgagaaaaatatggaactagggtcaaccggggtgatggaaaatattgttgaaattgactctagtccgggggaaaaagaggatgtcaaaatccgggaaaaattgcaaagtggaggtttgaagtcacattccaagcatttttcaacattggaattgtacggtgatatagaagttgaactacacgaatcaatggagggttgcgaggaggaaaaattcataccatacattttacaatttgaggaaacaagaaagcaaaatgacatacctcacatgaaagccaagaaacgcaaaatgaagaatttaaagcgtggcttgatcatatgcttaccacccccaccgcccgtggtcgcaagcttgattccaagctaggtgcgcaattcatatcatccaggtggctagaaaagtggtaaagttgacttgcgtcgtgccacgacattaaatgcggcgcttggtgggaggcaacccatcgtgttcaaaattttcgttcatttttgaaaattttcttttttagaatagcttcttatatcgtttctaaccaatctgccaagtttcagaatttttggagttgatttgagcaggttggggtgaccaggtagccaaaaaacagtgctggtgcaaaacaattgcagtgcagcacattgttgcactatgcgatcgccgaagaacgagtgcaatcgcataacagttaggttccagtcactatgcgatcgcatagctgccaatgctatcgcaaatttcagagactgtttgcactatgcgatcacatttattcacacgcgaacgcaccgtttccaggtaagtaaatctgacttttaacactggaaacgcccattcttctacccaaaatagattttctcatcccttggccctcaaaaatcataaaaaggtgttctctcttcaagttcacataactaaccaagttcaatctctccggtgtgtacttcatcactcaattctttctttaacaagttcaatttttgtgtgatagtcgtgtaaataaacacttacttttatttcttctccatctccattttatgatttttaatttagagtttttgttttgaatcttgtgtttgattgtgtgcatgcatgttgggtaaggttggttgagtgacgtttttgtgattcttgaacaaaatctgggccaaatctgtgcttgaatgtcttaaaaacgtgtgtgcaaaactgttgcctcttatgtgcttgtgaaaatgcccaagagaaaagaaagctgggcgaaaaagggacctatacgatcgcaagtcactgtgcgcgatcgcactattgaaaaaattgcagagcgaaaaattgccttatgcgatcgcatcacaggctacgcaatcgcacagtgtcagcaatgtgaataaagaaaaattccctatgcaatcgtagtgttatgagagcgaacgcactgccttacaaaactggcagtaaaacagtagctttgtagttttttgtgctgttgcttcgcaactcgtttctttgacctagatatattataatactgtgtataaagtacctgctcatgcgtttaacatttggtctcaatttgtaggtactttgtacataaaatggcctaaaaaatgtgaaaatgtgcaagaatatgttcccccagttatggaagaagaatattttgatgcgacaagattcacgacgactgagtgtgaaaggaattatgacaagctcatgtcaaagagcattgtcaaagaaagaggcatccatctagacaacctcgatgctaagatgcccgagttttttcggagactgaccgacagtggatggatatgctttgctcctgaaccaatcaaagagaactacacaatagttcgtgagttttatggaaacgccgtgaagactaatttccagggggatgtattcacgtttgtcaggggcaagcgggtcgaatttgggcccgaggtaataaatgcatactatgggcttcccaatgctgacaatgagatatacagagccaggggaagagagagagagaggaacatagtggttgatggaaaaccttcatgatggggtgcaaccgacttgggcaagaatacataaaggggttgattctcccgagttcactgtggaagacaagatttgtctatccattatctgtgccaggattgtgccagctaggcatgagactgaggtgacgcctgaaaaggtattgatgattgctggcattatggatggctttccagtgaccgtgggccaacacatcgtgagtgaaattgaggaatcatgcaacggaaggtctagaagcctattcttcccctcattgatcactcagctgtgttatgatgctgaggttttaccgaacccgactaatgttaagaaggaccctgccgtagcaatctatcaattgctttgaaaagggacaaacggcgggaagaagaagaagagaaggattgatgtgctatctccttcatttgggaagtttgatgagtccgccgagggacccggtggtgcctccacagctacagcaggatcacatgaccttatttacccccttccttatggccccccactatgcgccacatttcccatcagatctatggtgtagatgctcaaatttgatcgcttttcgcgggtcttccctctagtccatctggtgagggcacttcgactgggtctggtaagaagacaccgaccttggatgatgtagtgctggagcaaaaagcaatcaagaacagattagaggacatgagccggcgacaaggaaaacttgaaaggcgacatttgaaattcaaggaacatgaaaagaagaaaagcaagtttccgtcgaagatgatgcacaagctgagctcactctgtggctcacaggattctgagaatgatgatgatgaggatttggagcttagatttcccaccacctccagttctgactgatgcagtttcagggagcacctccttctttttactttgttttgattagttgcattggggacaatgcaatactttaggttgggggtggcacatattatgtttgtaaagcattctgtggagcatgacattttcttgtgacttgtgtggattggttaatatttctagtttattaataatattttgtatacattttcttgttggcttttattttagttcttaccttttattttggttcttagttgtttttattttggtttttatctttcatagtagtatttagcatttttgtttttgtttgttgacttttatttttcttgttattatttgtgtttgtttttgtttttgttttggtttcattatagtagtattaatgaaactccttggtttttcttcctaccacagttcttttccaaggaatttatttgtgttgaaccgggtgactttttcctatgatggatggtgtgacaactttcttaagggattagtcttgtttagttttttttattagaaagtaaatattttttttagtagttagtttagtagctagttgtgaataaattagtttttggggtgtaatcttgtgcccataagacaacatgtgacttgtttagtaccaatatattttaaaatttggcatatgaagtttttttaaaaaaaataaaaagataaacaaaagtaaaatatatatgatagaaacaattaattaaagtaatatccttgttgtgatttttagattctaattttggctcttttgattcactaaatggcttcttaggctacatgtgatttccttgagattcattggttccaattggattttggatttgtatttcatttgagttttcacgtgccatgtgtggtgagcttaagttgtgaaattcttttgcatcatttgtagtctaaaacttgtccggaatgtgcttcaaggcgaaattctagattaacttggtttgaaaaataatattaggccttccttggaacattattgtgcctaaatttcctacccatgaatattttccctagtcaacccttttgagccttttaactttttctttggcgaccatgttacaaactattcttgtggaaccatacctccctaagtaatttaaagtataaatataggctaaaaacctaagtttgggggtggagattggaaaagttatgatatggaggcttctcaaaaagtgaaaagtgttgtaaaaaaatgaatgaaaaaaaaagtatgaataaatggaagactatgtgatataaaaaaaaagagaagaaagagtgaaaaaattctttaaggaagtggactttgattgttgaaaaagtgtagtgcttaggtaggttttgagtcactcttaccaaattatgccataccctgaccaaagcctaaattaacaccctttaagtcctaattgattttgaaccaagtatgtctacattagtggagaaatacataaagagcaagcctatggtactacttgtgtgcatttgaatatctttgtgtgagaaagagttggtcctttccatttgacatcccatctatgttttgaaatgcaatttatgagtttgggattctttcttaaaatgtgagggaacatgagactcgagttgtgaatttaatcccattttcaattgggaggaatgagtgtaggaagacaattgtgatagagaggcaaattttgaatctttagtgtcatgacttggttgttactttggttgatgtggtgtttaagcttttaaaagtgaaataaaatgtgcaaaaagttagtgattcatatgccttggattaattgttggtaccaaccgaagtcattagattgtgcttgaattgaccctttttgacttgagatgatatttggtatgccgttgagcttaagtgatcatattcttgtggggtgttcttagtttttgaattgcttgaggacaaacaatagtttaagtttggggttttgataagttggtattttaccaacttatcttctcttaatacttaatcttttgtgtaattttgatgagaaataagacatttattgatgatcattggtatatttcagatgtcaagtgatttagagatgattgtgaagaaatcgtgtgaaaacaaatcaaaaaagagctaaatgaaaattaggaaggctgcccaacttttacactgtacgatcgcgtattatggaatgcgatcgcataagtcacagttatgaagcaatgcaaaagcacccgggttatcgcaaacgcataagaggaagccagtcagcggctggtcaaagcaattgtgcaaacgcggttgacagtgtgcgattgaatacttgtaggaaaacattgtatgcgaacgcatggcctacagttgcgatcgcataatgcattttctaggcagttctgggcagttttggcatttcacatctttaccccccaaaccacttttatacacgacctagcagactttttcagcatctttggcttagctttgaacatttttggtcttgaagacaaggaagaacaagtcttgaagctaggttttgcacacacacttgggttttgaagatttcaatcttgtggttatggatttcttaaccatttatgtttgtttctttatttccttgctttgtattgaatatttaagtgtgtagtatttatttccaacacttgaatcttgtttatggaaatattcatatttaaaatgtagattaaataccttgttgtgcttatgtattgaatgatttttattcttttatgaggtgagttgtttattttttaattattcttgttctttaatgtttccaaaggaattatctaaccctaggactcgcccattaactccgaattaattttgaaaaagataatttggggttgggaaagattaattaacaagaacttgagactttagccctcattttatagattctacctaggaataagattgaactacttgtaaccatatccgggtgtgcttaatctcttaattgggttatgaataattcaattaggaagtcttgttagtctttgaaaaaactaattaagaattactatttggctaattaacataaactcgctcatatttgtaaaatcatgaaatacattggattgttacttgagtgtaattcccgatgcattcatacttgttgccattgatcattttacttgctttataggttagtctatatttctgaatttagttataaatattttcacaataaaaatctaagtgtttggcacgacgtgataagtgataattctcttacattcctaatcgcctccatattgttctccgtggaattcgaccccaacctagttgagttactatatttgacatcgatcgcttacactattctaaggtgtaatttgagcgtatcagcgacccaggttatgcattcgcgtataacaaaatgacccctagaaaatttacactacgcgatcgagggagaagcttcacgatcgcgaagcacaaaattattgtgcaccaaatacaacaccaaatacagtaaaacaacaattatttctaagttcaaaacatcccgtagcctatctgaaactcacccgagtcctcggggcttcaaaccaaacatgcacgcaagtctaaaaacatcatacgaacttgctcgtgcaatcaaatcgcaaacataacatctaaaactaagaatttgacctcaaaactcataatttttctcaagaacacttccatttcactatttctcatccggacgtccgaatcacgtcaaatcaactccaagtctcaccaaattttgcagataagacttaaatatcataacaaacatgtaccggacttcgaaaccaaaatacgggcccgataccaatgatttcaaacaataattcatttctttatttccttaaaaatccagcataacaatttccttcaaaaattgatttctagagctagggacctcggaattcaattctgggcatatgccaaagtcccatattttactgtggacctttccgagatcgtcggaacacagatccgggtccgtttactaaaaatgttgaccaaagtcaactaaaaaccaagttttaactctaaaaattcttatttctcatattttcatattaaagctttccggtttcacgctcggactgcacacgcaaatcgagataaataaaattaatcttttcgaggaaaatgagcccggaatggagtcttaatttataagatgaccctttgggtcatcacataaacgctcccgggtcatccaaaacctggtccgagcatacgcccaagtccgaaatcatctacgaatccattggatccgtcaaatcccgattccaaggtcgtttactcaaaatgttgaccgaagtcaaacttggcctttcaggccaaccttaaggaaccaagtgttccgatttcactccaaactctcccaaatcccaaaccaactatccccacaagtcgtaagtcagtaaaagcaagtacaagaagtcttatttaggggtacacggttctagaaaacaaaacaaccagtcggtccttacaattaacatcaataatgaactttaaatacttcttactattaaaatcttagtttattttgttttcaactaaatatgtattagtcaagtgtatctaaataattttaggaaaaaagattagttgatgaaaatattctcaatctcaaattgcaaatttgtcttagttggagaaatataattgcaaattcggactggtaagtttcagataccagataattatatgtaaaagttgtcggggaaaagaaaagaaataatccagcaaaagaatataactttttttgaaagaaaatagaggatatatcacaacactcctaatatttttttaatttttaaatataatcaaaaaatctaatttgtaaatattttatataacgacataatcagatctctcaaatatggattccagcctcctatgtaactacatagagtaataatctatgtaaaacacgaaaaaaccatgcatttctttcatcgaaggaaatttaatcatgactaagatatattataatactagtactcgtactcgcacggtgcgcagtaaatattacaaatattaattaaaataaatttgtgaccggacttgtttgaacattagatcgtattgttttaataagtttcaattgtcatcttatttgtcaatacgatatacccaatagtaaaatctctattaaattaaagggacttatatagtcattgaataacctttttgttatttttctttattatattatgcaatgttattattattatattgttaataaaatttttattagcatattaatttatttaatattttgtcgtctattttattactcttgaaataatttgttattttgatatttattttattgttatcaataatagtctgaattttaattaagaaaatctctattaaattgaagggacatatatagttgttgaataacttttttgttttatatatttctttattatattatccaattgttagtgttaatattgtctgtaggcatgcaaaatttattgaatttaaattcaataaagcaatttggattatattttaaattcaagatatattggtccaaataaatattgtgggctaatatataaatgaattaattatataggtccaatatatatggattaataaataagtcttaatccattgggctatcccatttagttgggctacaaacgatgagcccaattcattaggcccaattttctatcttcctggaggcccagtttggtgccacgtgtcaaatgacgtggcacaccaataggaccatgccacgtgtcaaaatgacaagacatgccaagtcaaattaaagggccaatgaaactgcgccacgtgtgcaagtgacatgttctggccaatcaaatgcggccatgtcacactttaatttgattggtcggaaagagtttgtccttatcacaactcctcccttccacaactataaataggggtcttcataacccagaaaagacaccagaagttataacaagaagcaagagagagctcgtggatcaaacgccgcaaatttctctacaagtttcaagcttcaaacaatcaagttcaagttcaataaatcaagttcaagctcaagaacgaagaacaattcaagttttcaagatcaagaacgaagtcaaatcaaatacaaggcgttcaagatcaaggctacttgttcgtgatacaattcgtggcaacaatcaaagtgttcacgacggataaatcaaatttaaattcaagatcaagctcaaaggcccttgaatttatactagaaaagtagaatcagaggattcatagagattgtaacgctcaaatatttgaaatcaaatactacgattgtcgcaatatttttcagtcttgattttattttcttgacgcaatttattgtctacaaattctggcacgcccagtgggacaatctctacctctcatcttctcatctcagcttttcaatcaccaaagttcaagaacaacgaaatggcttccaagaaaaccaactccagctcatcttctgccaaggctgctaattccaggttctatgctgatgtggaagacatactcgaagttacctttggaagctttgggacagttacgaggagcaaggcaagctcgttaggacaacaagcaccccaagtgccttctgcatctacccttgttttgggatcttcatcctcaaaaggagcaagatcttccacgaacgcacctgaaggaggaagcgatgtcgctgaaaatatcaagaagactcttgctctgcttgacctctctggatccaagcattcttctgtgaaggaagatgatgacacttcaagtgatggatcctccccacttaccctacagagcgtgagccaatcaaggatcaatctatgtgaaaatccgtgctactctccatcgtccacaacaatcatgcaagccatggtgacaaacacttcatctgtggaggagcagttggcaaacctgacggaagcgattgctaacttgaccaaatacatgcaaactcaagatgctagaattgacaagctaacagacagggtgggaatcttgatggaagaagaatctacccatgcacctggcaagctcccagaagttcaagagattgatcctcccccaagacaagttgcatccaataaggctatccctatctcgtctgaagggatgattccaatcgatcaactgaaggagttcatcgaaggaactatcaaaagcaagtatgaagttgctaccaagtcttcccttacatacgcgaagccgtacactgcaaggattgatatgttgaagatgcctgttggctatcaacctccaaaatttcaacagtttgatggcaaaggcaatccaaagcaacatgtggcgcactttgttgagacatgcaacaatgctggaacttatggagattacctcgtcaagcagtttgtccgctcattaaaaggaaatgcttttgattggtacacggacctcgaggctggatctgttgatagctgggatcaattggagcaagaattcctcaatcacttttatagcacgagacgtactgtgagtatgatagaactcacaaatactcgtcaacggaagagtgaaccagttgtcgactttatcaatcgttggaggaatgcaagccttaactgtaaagacaggcttagtgaagcctctggcatagagatgtgcattcaaggtatgcattgggtattgcgttacatcttgcaaggtatcaagcctagcacattcgaagaacttgcaactcgtgcccatgacatggagttgagcatggaatccgccaaaaatgaaaggtttcccatctatgaacctcgcaaagggaatgacaagcaagaagtcataaaatgaagcaagtttgtaccaagacccgaaaataaagaagctatgaatgtcaacacatcacctgcgaggttcgtgatgaaagtgagcaagaagtcgggtacgagatccgctccgtttcaagtcaatgcaagtggaaagttgactctaagagaaatgcaagagaaagagtactcatttctggattctgatgtgccagctatttttgaagaactcctcgagttaaatctcattgagcttcaggagatgaaacggccaaatgaagctgggagaacaaatgacccaaattactgcaagtaccatcgactcgtgagccatcctctagagaagtgctttgtcttcaaggacaaagttatggacttggctcacgaaaagaagatcgtgcttgaagattgagaaggcaagcacaaaccaagtttctatcacctttggctcattcagtccggatgaattatgcggttttaaagaaagtaaagatgaaaaattactggaaaatcacaaagttgaagacaatcaacctgaagacgatggaggttgggcattggttactcatcgtaggcaccacaaaaagatcccacaaaaagaatcagtggaacaaccaacaagaaaaattgtagtaagaagactagggagatggaacccagttaagcacttgaagaaaacgaaagtggaggtacaccaccctcaaaagccacgacgtccagtaaccttggaggagtttgtaccgagttggttccgcacgaagatttcccatggggtaattgatgcctcttgttgccacactgacgaagggaaagaagagagtgatgatctaccattggcatcatcttcggaaaagcttatcgagtccactcctcaagaagtcaatgcttgtgaggaaaaagtcacattaacaaatgacgatctgctgctaggtgacacttctcataaccgcccattgtacctggttggctatatgcgtgatgaaagggtaaaccgaatttttgttgatggaggatcctcagtgaacattttgccaattcacattgtgaaacaacttggtattcccatgaacgaactctaagaaagtcgtgtgatgatccaaggattcaaccaagggggaaaagagccataggcggcatgatgggaatcacgattgaataaatgcaatcaagtgcattgatgcatgtgatcgatgcgaagacttcatacaatgtcttgcttggaaggccttggatacatgagaataaggcagttccgtctacctaccatcaatgtttaaaatactacgagggtggagtcgagaagacgatagttgccgatgatgcgccattcaccgagggagagtcacacttcgctgatgcaaagttctacttaaagaaccacattgtgaaggagctaaaagttgatgatggcataaaaagcaagaatgacgagcccatagttaaaagagttgaggtaactattggtaaagctagatctgttactgaggaggtaccacccaacgtgaatgaatctcatagaggggatattgcatctcatggaaagaaagtaagtgctaagctccaatacgtccctaaaaggaagaaaaacgagggcgaatcatctaatctccaaaccaacacactaaaggagttaactcttccggtaaaatgaattgaggcagtaaagttatcctcaaagccgcttgcagggtttgtagctcaaaatcgtttgcagaatgtggcactccatacaaagcgaacagatgaaggttttgatcctaacgcgtataagttatttgcgaaagctggatacaatctcgatgagccttcaaagttagggaagctcccatcagaagctgcaacgaggcaaccacgtgaaggtttgggatacaagcaaccgtcaccagtgcgcatctccatcagaagggcgagtagcaatcacatcactatagaaaatgaatatgtcgcttctaacaggccttctgtttttgacagacttggaaaatcaactgtgagaacttccgtatttgagagactgggaccactaaagaaggggaataagttccagagaaattatcaaaatacaagaacacccgctttgcccaaaattcagaggatctctaaagattcccagagtttggttccttctagaatgaggcgacaaacagaagtcatggtttcttatgatgaagtactgaaggcgaagccatacactgtggtctacactaaagaacgtgatgacgacgaagaaagtgtaggctcttcgtatcatgtcactatagaaggcgagaatagtgttccatcttccatggaggataatgcagaattggagggtgtttcaccatgttatcacatatacgtcaacgatggggaccctcaagaagatgaagatgcgaaagatgctcccccagaacttgaagaaggggtgaaggtaacagttgatgctttaaaagaagttaaccttggcaccgatgaagaaccaagacccacctacctaagtgctttactaggagttgatgaataaagcacttatattgagttgatcaaggagtttagggatgtatttgcttggagttacaaagagatgcctggcttggaccccaaagtgccagtccatcaccttgcggtcaagaatggtgctcgtcctgttaagcaagctcaaaggcgctttaggccggacttggttcccctgattgaaaccgaagttaacaaactcattggagctgggtttattcgggaagttaaatacccaacatgggtttcaagtattgtccctgtaaggaagaagaatggccagattcgggtatgtgttgacttcagggatctcaacaatgcatgtcccaaagatgaattcctgcttcctattccagagttgatgatcgatgctactactggttacgaggcaatgtctttcatggacagttcgtcaggctataaccaaattcgcatggcaccaaaagatgaagagctcattgaatttcgcaccccaagggtatttattgctacaaggtgatgccttttggcttgaagaacgctgacgctacttaccaaagggctatgcagaatattttcgaccatcttctccacaagaatgtcgaatgctatgttgacgacttggtggtaaaatcaagaaagaagggcgaccacttgaaagacttgagaatggtatttgagttgctccggaggtaccaacttaggatgaacccattgaaatgtgcctttggagttacttctggaaagttccttggtttcattgtccgacatcgagggatcgaaattgatcaagccaaagtagatgctattttgaaaatgcctgagcctagggatattcatgaattgaaaagtgtgcaaggaaagctagcataccttaggagattcatcttgaacctagctggaaggtgccaaccatttagtcgcctcatgaagaaaggtgttcctttcaagtgggaccaagcttgtagcaacgccttcgaaagtatcaaagcctacttgatgaagcctccggttttagcagctcctatacctggaaagccattgatactatacattgcggcgcaagaaaggtctgttggagaactgttggcccaagaaaatagtcaggggaaagaaaactccctttactatttaagcaggatgatgacaccaaatgagctgaattattcgccaattgaaaagttgtgtttggcactagtcttctcaattcaaaagttgaagcactactttcaagctcatgttgtccgtcttgtttccaaagcaaatcccatcaagtttgtgatgtaaaagcctgttcttagtgatcgactagcgagatggtatctccaatttcaacaatttgagattttgtacatctctcaaaaagctgtaaaaggacaagcattgacagacttcttggcagatcatccgatacctgatgactgggagctaactgatgaactacctgatgaggatgcaatggtcgttgaagttcaacctccatggaagatgtactttgatggttctgcacatcgtggaggagccggtgctggcgtagtatttgtcacttcctaaggtgaagtattgccctactccttcaccttaacacaactctgttccaacaatgttgctgagtatcaagcattaatacttgggcttgaaatggccgttgacatgaagcaattgcagttgcaagtctttggtgactcccagttagtggtcaatcaatttttgggtatttacgaggttaagaagcctgaactacgcccatatcatgattacgctaaaaatttagtggggtggctcgatgatgtgactattcagcatgtgccaaggaaagaaaataagaaggcggatgctttagctgccttagctatgttaaccctgcctgatcaagcacaagttactgtctgccaaaaatgggtagtaccgccactaaatgaggttgaaggtgaagaaaatgaactcaagcatcttgtcgctatttctgaagttgagaaagaagaatggcgacaacccatcatcgactacttgtgctatgcgatacttccagaaaatccgaggagaaggactgaaatccgtcgtcgcgcacctcgcttcctttactacaaagacactttatacagaaggtcattcgagggagtactcttgcgatgcttaggagaagaagaagcactccaagctttgcaagaggcacattctggggtatgtgggtcgcaccagtctggaccaaagctccacttccatataaaaaggatgggatattattggcaaccaatggtaaaagattgcttggactacgctcgaagatgcaaggcttgtcaattccacgcgaatttcattcatcaacctcctgaagtgttgcacccgactgttgcatcctggccatttgacgcctggggattggatgttgtgggaccactgccaaagtcttctggtgggcacctatacatcttggatgcaactgactacttctcgaaatgggccgaagctgttgctcttaaggaagtaaagaaggaaaatgttgcaagtttcattcgagtaaacataatctatcgatttggcattcctcgttacataataacggataatggaaagccattcgataatcggttgctgaacaagatttgtgatctctttggcttcaaacaacgtaactcttcgatgtacaatgctaccgccaatggtctagctgaggcattcaacaaaactttgtgcaaactgctgaagaaagtcatctccaaatccaaacgagattggaatgaccgtatggaagaagccctatgggcatataagacgactcaccgcacgccaacacaagcaactccgtattcactcgtttatggagtcgaagccgtcttgccacttgagcgtcaaataccttcattacgactggctattcaagaagggatcactgatgaagaaaatgctcaacttcgattagcagagttagaggctctcgatgagaagaggttggaagctcaacagattctcgaatgctatcaagctcgattgtctcgtgccttcaataaaagagttcgtccgaggtcctttcaagtaggagatcaagtccttgccataagaagacccattattacttcccataaacctgtggggaatttcacttcaaaatgggatggtccatatgtcgtgcaagaagcttattcaagtggggcttacaagctggttgatgcagatggcttgagaatcggccctatcaatggcaagtttttgaagaagtattatccttgaagttgtaacgctccttaacgcatgagcataaactgcatgttactcctggcccgcaagagtataaactgtgcacggtccacaaaataaagggcttggtaggttgaaaaccttgaaagaggcggcctaggcaaaagttaggaccaaaaaaaaaaaaaaaaaaaaaactcacccattctgaactatggtatgacttgatcctcttcaccgaggtacgtaggcagcttagagtttcattctgagctcagtcgcataaactaaaaatacacataatccctcaatcgttgtccgaatgaagcacgatggaatgtaattcattcaatcaatattcaaaagtcgagttaggacaccgtgcctctgttaaactttgaatcccatttgatttaaagggggcaagccgctatgctaaattggtgtgggcccaagatatttggtgagaatgaatctcttgaattttaatttttgacaattaaaagggtcttacaatatcaaggctcccacaccaagatacaaagattttggtgaagtcgcgctaattcaagatatattgtcggcatatcgggaattaaagttggcttcaaaatactatctgggacgattctcaatgtgttcgattccgaattttggatatgtcttagattttgaagtctattttccatgaaattaaatggttcgtgatttcaacattcctacattaagatacaaatattttggtgaagccgtgcaaatctgaaatcgtcgacatgacagattttgaagttagcttcaaaataatatctgagatgattctcaacgtgttcgattccgaatttcggatatgtcttagattttgaagtctagttgccatgaaattaaacggttcatgatttcgacattcccacatcaagatacaaatattttggtgaagccgtgcaaatttgaaatcgtcggcgtgacagaatttaaagctagatccaaattaatatctgggatgattctcaaagtgtttaattctaaattttggatatgttttagattttgaagtctagtttccatggaattaagcggttcataatttcgactttcctacaccaagatatgaattatttggtgagactgcgcaaatctgaaattttcaacgtggtgaaatctaaagttggtttcaaaacattattttggttgattctgaaggtatttgattctatattttggatatgttttatatattgaactctaatatttataaaccaaacggttcattatttggactctcccacgacaagataagaatccttcattacgagtacgtaaagctgaaaattatgcgaccaagataaatgtcgggcaatgtaaagcaaaagagaagcaatcagatttaagatgaaataaatatccactaggtcaacctaacataaagataaacggggagataattctaatagcctaatctaaacaaaacttgtaattgatcaatttttgacaactagtctccaggttcttcttcttctcctccaaattggtcgaatcttcatcagtcagcaaatttacgttgtcatatgaagaaacctcagactcggcagctgaaacttttgcctgaacctcttcaacctccttttgggtcgtttctataatgccttcgaggttctccctctcttgttgtaatgtctgcaatttcttcaaaattctcttcagtttcttttcactagaggaaactttcttgactttctcacttgcttcaagtttgaaagattcgagacgctccttagcttcagaaatcatctccatcttctcatcttgactcgtcttctcagccaaattggatcgctcttggtcatatgaggaagcaagctcgaaaaaagaatccagtaaacactctaatggagaaagatctgaaatattcgcctttttcatatcctcaaaaacctcagtaatttgctccctataagatgagagcagttctgcacgagtcttggagagtctattgcaaatatcctcccaaagtcccaagacgaattcctttttgcgattaaagacaatgctctttccttcaaaaatagatactgttgtatttgtcatcggtggaatgcgagttacctcattttgagtttgttggtttagggatctgtcatgaggaagagatgatgcatttgaaggtgacctcactttagacgtaggccctccaatagattcatcactcacttgcggctgctcatgtggggataccaccggatgcccaatggcatttaactgaataaggaaaaggcaaagaaagtgaatattttttttagaaccatcgtttgttaaaaaataaaaataaataaagggtaaggtgattgtatttttacctccttgttacaagctgtaggcgttcttgagggactatcaacacttggaacctctacaatctctattgggttaggccgtttccttttccaatttcgatcttcattggtactctgacttgtatcttgaggaacttgcgtgctaaatggaagaactgaagggtgcttctctaaatccgctgaagtgcacaccacctctttcaaagccggcttggaggatttaagcttccttttcttatgttgtgtagctacttttgggattggagtacgtggctctttaactttcgggagcgtctttccaacaccttgatcttcacctcctaaaggaatagtagactttagcccaacattatctaccaaagcttgtaaattattctcgagaaacttcccatgcgctttctcccaccaagacatataattggtggagaaaggcttctccacaggatcgcccgttgggggaaaaaccgcgcgtgacatagaccgatacagcgtacaaatcctccaaaatctaagtccttcatctagagaggcgttacgaatatcattctccaacaaaccggggacgttctggtaaaacccaaattgacgaccaaaccgatgtgggctatagggctcgatgataaatgagttaccatacctcaaagggaggtaactaaaacgtaagctcatgaagtaattggactccaactcttcatgggcatcgttatccacataataataaggacgagaattggttaacattgttggtgtccaaactatatcctccccgatgtggatgtgtttcctcgcgtccttcccgtcaaagtacctcgcagctccctctcctgagtatgccaccatcaaagggacagacggacccttagcaagtggatagtgggttttgaagtaatgtgcaagccagccgtaaacataatgaatggggaaacaaactttgacctgatcaagttgggaagaacacgaaatcttattcaaaccattataaatactcgccaaaactggaatcgcaaggctagtctttcgcccccctgccatcatgcttgccatcttaaaagtctcgggacgaatgaagttttctgtcttgggaaacacaaaggcacatagccaaattgataagaatgctgctacataagtttcatctttcttgtcagccctcaccctaagcttggagaatataacttcttgatcacttgaccacctcgttgtctcgggaataactccgttaggattatgtgtcgacttcaggtgcgcagatttcttttcctttcgcagtggggcggttttatatattaaagtcattttataccaaaaattagtccacttgttgaaagagaccctttggttagcacccgtaccttccttaaggtaatggaaggcagcaaataaatactcgcaagatcgagggataaatctcatctggttttcgtccaaaccgataagttctcttgtctcaggtaccacttcttcataaggagaacccacaatgggcagacctccaaggatatgtaagtcgcaaagagagatagatagttccccagctgatgtaagaagcgtgttcatcttggggcaccaagcctcgcaaaatgcttgtaaaatgttcgagtttagatcataagtgaaaagtgaagcatatacagcatcataaatctttgatgtactcagggtttgttggcttccaccaagtacatcttcagcccattcccaatatcctagaatgtgacgatactcgccctcgattgttgctgtgcttccccaacgtacttcgcattgaattatgcgacgtcctaagcttggaaaggtgctagcaatgtttatgtggcgatggattggcgcttggagagaccacatcttggacaatggattagaagtggacttgtgctctaaggtccagttttctacatgaaagggagtttctcaaagaaggccatgaggctgcgtaccggccagcttgcggggcgtgaaccaaaagcttcatttgttctatgccatctttagtctcgattatgagatatctaagtttggaggaaggtgaggtatagtctctgaaactttccatctctcgagctgcaaaaaaaaaagggtcatcaaagtccaaatcaagaatattaggatgagcacaaagtctaaatgagtaaaatggcctccggtagtcgggccacattgagagtaatctctccgatagtcaggtcattttgagagtaatatcttcgatagttgggccacatttagagtcatctctccggtagtcgtgctatattgagagtaatctctccgatagtcggtcacattgagagtaatctctccagtagtcgggtcacaattgagagtaatctttccgatagtcggtcacattgagagtaatctctccgatgtcgggatattttgagagtaatctctccagtagtcgggtcattttgagagtaatctctccgatagtcgatcacattgagagtaatctctccgatagtcgggacattttgagagtaatctctccagtagtcgggacacattgagagtaatctctccgatagtcggtcacattgagagtaatctctccgatagtcaggtcattttgagagtaatctctccagtagtcgggccacattgagagtaatctctccgatagtcgggtcattttgagagtaatctctccgataattcgggcagggatgaatacccatcccctcacaccctaagattgtcttcttcatgcatggatcatctcgttaaacaagaacacatccttcttgtttgacctacaaaaaggagaaaaagaataacaaaggaagaaagcaaaaaaaaaaaaaagaagaaaatttaccttttgaatttggacttaagcgatgaactgcaaattactgatactgagagcacatgaaatatggagttcatatagatgcttcaaggaggttatagagatataaattttggtgtgggactactctaattagaccccaaagaaatcgaattacaaagtgttattctcctaattggaaaagatttctatgaggcagtgaatttcctacttacgatcaaatttgggaaagaacttggagttataataaaatagggagaaatatgtttgggggtgtattagtatcgatatttaggagaaatccaactcctttgatgattaggttatttgagtcaaattgatatcatacaaatttgatatgaactaacgtaaaaggaaggcattttgttttgaaaactaaagcatcaattgtgtgaatagttaattcctcactataaatttcaaatgcaagaaaaaaaaaagtcacttgcaaactttttaaaatcaaatgagttattttgagctatccataaatacttcaagcctagtaacggagattgactactcacaagtcttgaagtagagggcatttgtaggcatgcaaaatttattaaatttaaattcaataaagcaatttggactatattttaaattcaagatatattggtccaaataaatattgtgggctaatatataaatgaattaattatacagatccaatatatatggattaataaataagtcttaatccattgggctagcccatttagttgggctacaaacgatgagcccaattcattaggcccaatttgccatcttcctggaggcccagtttggtgccacgtgtcaaatgacgtggcacgccaataggaccatgccacgtgtcaaaatgacaagacatgccaagtcaaattaaagggccaatgaaactgcgtcatgcgtgcaagtgacatgttctggccaatcaaatgcggccatgtcacacttcaatttgattggtcggaaagagtttgttcttatcacaaatcctcccttccacaacccagaaaagacaccagaagttataacaagaagcaagagagagctcgtggatcaaacgccgcaaatttctctacaagtttcaagcttcaaacaatcaagttcaagttcaataaatcaagttcaagctcaagaacaaagaacaattcaagtattcaagatcaagaacgaagtcaaatcaaatacaaggcgttcaagatcaaggctacttgttcgtgatacaattcgtggcaacaatcaaagtgttcacgatggataaataaaatttaaattcaagatcaagctcaaaggcccttgaatttatactaaaaaagtagaatcagaggattcatagagattgtaacgctcaaatatttgaaatcaaatactacgattgtcgcaatatttttcggtcttgattttattttcttgacgcaatttattgtctacattgttaatagaattttttattagcataatattttatgtaatatttcagtatgctattgttttttttttggtcaaacaataaaattttatttaaccaagtatgaaatgtacatccacaagttcattgtggactctagaactagtcctgttctttgtaactttctataaacacttcctcctctccgctatagacctatactaagtttgggtatgagtttcagctatcgaatagccttttccaactgcttctatgttttccttccctatgcagttgaataacaatctttcttgaccttagtatgcaatcttgttgatattgttgaaatcttctagcattgcgttcactccaaatatgatagacagtcgcaactagtaaccatcataggacctctgcatgagctttgttgttgcatattttggtcgttaacctttcaactttcttctcccaacttcctacttggctgcactctcctttccaatgtaagaaggagctcccatagctgtcttgagtattcacattcaaaagatagatgtgaatgtgtttctttagtatcagacatgcacaatgcaaagttcctaggaacttgtattccccaattggccaatctgtcaacggtagcgagtctcttctgtagtgcaagccatagtataatctgatactttggcacaagacatggccccatgttgtggcttttccacatgactttaggatattgtgggatcagatgcatatatgccttcttgattatgaacttatcaacttgagtgaaatgttgcaactctgtgtaaagataactattcccatccattccttgcatcaaaatatttcctaacaagctagtgtaacgacccgagcggtcgtttttgcgtattaggacctcgttaccctaaatgagacttcctgtagcggcttgttatgatttatgacctgcggggtcgggtggttcgagattcggaagtgtttagagtgctataggaacacttggttccttaaggttggcccttttggccaaatttgacttcggtcaatattttcagtaaatgacctcggaatcgagttccgacagttccagtagcttcgtatgatgatttcagacttgggtgtatattcggaatgggttttcgatgacctaggagcgtttcggcgcccaattcagaaataggaatttccttaagtttgaaatttggttgggaacgtgcttttgtgttatcgaggtccgaatggaattctgagatagggaatagttccgttatgtcatttatgacctgcctgcaaaatttggtgtcattctgagtagtataggtcggtctggcgcgttgttatagaaatcaagaacttgaggtttttaagatatgattttaggggttttgggaggtgattttgagtttttgtgttgttatgagtgttccgaaggctcaagcgagtccgtattatgatcggacttgttggtatatttggacgagggatcgggtgggccccggtgcctctcgggcacccaacgtggctaaaaaccagctgatgcaactgctggtgcacctgaactggtgtgaccgcaggtgcagttttccagtcgcaagtgcgggaccgctcctgcggtccccagcatcgcaggtgcggccccaggtgaggccgtcatttctcgaagttgtggacaaaggtccgcaggagcggagccgcatgtgcgatcccagccccactcgcccagttccgtaggtgcgagcccttgctcgcaggtgcgaaaacactgtaggccaggtagtgtgttcattaaatacgggagtcttcactttattctctattttcctccattgtaagaccttgagagattgggaaattactccccgaccaaccaccgtaaggtaagttaattccaccctaaagttagttttaattcatgaattgctagttaaattacctactaaattattggaaaatcaagatttgggtagtaatttaggttctagaggaatttgatgaattactcagttattgctatgaatacaagtagacatcgtatgttagcgacctttaggctatgggtgagtgattccttcgagaattttcgggattcaagcgtgcgggcccggggttgaattttgagaattcttcaagaatgctgatttatcgaataaataggataatttccctactttgagcatgaatttatatgattgtaccatatttgtctagttatgattccccgggtgtagagttcggagtttcgggcgcatcctttccgagaggtagcttcgacacgaggtgagtctcctttctaaccgtgtaagagggaaatgttctcataggtggtttgtatgctatatgtaactgttttgggggctacgtgcgcacgaggtgacgagagttcgtgtgtagctactatcctgccatgtcaggtagttttaggattcacgagcatgctttatgtgcctattatgtatctttaggcgtactttgagttgcttattctcttgagccagcatgacaatggtagaaagttgcatccgaatttccagttaattaatctctgttacaagtattgcctctactaaacttattggttaatttggtatatatatatatatatatatatatatatatatatatatatatatatatatatatatatatatatatatatatatatatatatatatatatatatatatttatgagttagcacccgagtcgcaggtatggttcgtaatcgggggaagctttacgataattcgttataatgtgtcagcacccgagtcgcaggtatgattcgcgagcgggggaagctttatgataattctgtataaatatattagcacccgagtcgcaggtatgattcgcgagcaggggaagatttacgaccaaacaagtgtttaagatgtctcccttatgacgccgtccggttgtcttattcctgtgcgcgcatgactatttggtactgtttcatggttattgacttgacagaaatttgggggaaaagaaagcagaaattggtatttactttcagtatttacctggatttcgtatgctttatacgtatttgatgttcattgtcttacatgcctaccgttttcattatacactgttatattatactgttggaccttagtgagtatcaagtcgacctctcgtcactacttcttcgagattagacgggatactcactgagtagatatttatttatgtactcatgctgcacttctgtacttaaatgtacaggttctgaggctggtacatctggttatcagaccggagctagatattgactgtagcggacctgacttcacggtgtgctgcttctactgacgatcctcagcagcaccatggagtttcttttgcttatgttcccgtctatttatttcagacagtgggaatgtatattctatcttttgtatatccagtttgtatgcccataatactcgtgacactagttcctggcacacacgtagtatttgtgtagattatgtccatacatatatgcatattttggactcacgccttattatgactgttctgtttaaaacttgttgattactcctaatcggttaataatctaagcttgtaacttagtatatatatatatatatatatatatatatatatatatatatatatatattgatatgtttaaggtaaatgggaagaacaatagtagtttaaatgttggcttgcctggcctcgctgttgggctccatcacgaccttagttaggattttgggtcgtgactgttgatacccaatttttcctcaaattattttcaaacttgaatatatactttcaaaaacactctatacagtaactggtatttttccacaatttttcgtatttttatcaaattattttcctgtttatttaatactttatattccataattattcatgaatgatgttataaataatttcaaatcactttcttgctcaatatgttatttatatcctatttaatttccttaggatttttttatttcacaaattagccaatattggcattatttagttaatttcagcagtttttgcgattatagcacaaatgtacatttataccattttaaaatcaataaatgatcatttatatttttatatattagtaaatcgccttaatttaatttatttggtctcaatttcattttttacacaattattagctattttattaattaattatcttatttaattgggtatttaacgtttagccacattttatttaaattataaccagttttttttaaatccaacccacctgaccctttaatccctaaccaacccagcccaaaacccgttcatacctggcccaaccccacacctgatctgaacaattgatcaaatgagatcaacggtccagatcagtgttaccataattaaacccctatcactacccaaccgacccctcattttcccggctccctttctctcttttcccctctctatctctctctagttctctttagaaccttcctttggcttcactcctctgatgaagtccattcatcttctccggctggttttctcaccggaaaccatggttcctcattgtctcatggttatttgcccaccttgcaccagtccagtgatgccctaaagccctcaagcgaacctggagtggttcactcatctcccatggtcctcatgccactttccggcctcccccggccgtctgagtaagagctacaacctttccggcttaagccggcgatgtttatgaggtttttcttacttttctgggttccacgaaaccctaactcctgtatctcttcgatttcttctagatcttctttaaatctacgatattacgaagtttctttacatgtttttctctgaaaaatacttctactttaacgatctttcatttcaaaaactagggtttcataaccccctttcgaaaatgatttctgcttctatttaatgtcatttttatgtttatttctacgatttaacgattgattcaaagtttctttcattttttaacttactttactggaaaccttaatttcccccccaaatttgagtccatctgtgactaatgtgtttatttagatgcacatacccttgtttctcataaatgtttaagctttccctatgattctatcctgttgttgctattaagtcttatgattaggttctctgtgttcttatcatgttcaaacgttactgccttgtctatgaacttgtgtgattttactattgtagtcactagggtttccaactctctaattcctatggtttgtctgaatatgtgctagcctagaatctaggatgatgttgtttgccttgcctaattgattgtattcctgttcgaatccttaattctctacaactttaccttgcttgcatctctgattctagatagtcctttaattaaggttggtttctccttgaatatttaatttgtgcatacaatccgtattgattggaatgatccatttgtttatgagatactttccttaactgagaatgattccttgtgagtttagtccccatccgtgattccttgattatttttcaaattgactgatgttttttccatataagtgcactcagtatatattttccttatttaagatactatgtacttgaccttattatatgccacattctttattaccctattatggtataatcaattttctaattgattctttccttatttagtctaatttacacccgttcaaatcataactccctgattaaagggagtctagacctctggttgatttaattgatgttgttcctataattttgctactctgtactcgtttctagcattatatatacactctattcattcctcacaaggacaaggaacaatacactattctaagccctctcctacacacacacacttactctcttgcttctcttacttgtaactcagtcggctgtaggcctagactgagtgattctattgttctattgcactactgctctactgttctattgcatctacacactactggtcgacttctcttcactttgctgctcttcactctacactcattctttcattcaactggcatggtttcagtttaagtttacaacatccaaaacaatatgtttctatttgtattacgattccttttgcttctcttatgcttctatttgtggttctgctgtttaccttgcaattagtatgtctatttttgtctatgtgatctccctttcccttttagttcagcatgcctattgattttcttacatgttcctacttagggttctgctgtttaccttgcaattaacatgtctatttttgtctatgtgatctccctttctcctttagttcagcatgcctatttcttttcttacatgttcctacttaggtttctgctattcaacctgcatctaggcttctgaatctctctttcacatgtctactgttaccttgccttgcatgctcaatgtgtctctcacactcagtctctgctctttatatgtatcccctgcacatgtctaatgtgttcattcagttataaggctagttgtttggttgatatgtttgacacttagtcatattccctgaatccttagaaacctttgatcatgtgtatgtgtgttgagttgcccgcttcacaggctgtgtacttgtccctcaaatctcttcacccctgtttgggtttgctggaccactctgggtcccttatgtgatgctgactttgtctgttttgtcttgcaaactatttttcaacaactgaacccttattttgaaaagctggtctttattaaaaaattcctatcctttttaaaactattttcaaacactgttttacttaacttcctatatcatgagcacatctcactactcctagtttctaagttcagcccccttcgtgtgagcactgccttggggaccatttgcgtacccattgaactctgacacacaaggctggcattcccacactgcacttactcattcctggctagggtacctgggtgtgagcactgcttgggatcctttgaggtccttagaaactctgacacacctgggttatgaaaggccaaggcatataacattaagatctggagatttgggcctattggtaggctccctatagtgtaacttcttaatttcttatttacttatgtaattcatgcaatcctggtctgtaataactaattgtaaaatgactatggggatggatagtgaaatgggtggggaatatgcatgctatacaggtagaaaccatgcttgtaggtttatgtttttatatatgtatgcacaatagtcaccatgcttaggaacacatgtcattcatgcattagataccatgatatttaggtctatctattttcagcatctcatcatgcttatgcacacttagaaatcatgttcataggataaacaaaaaaaaatggattttataatgttcctgctttagcattctcacaattgcatcacctagaaatcttgttcaggcataaatagtaacattaaccattatcaaatcttgcatttagaaatcatgtccccttaggattttattctcaacattctcatgttatctatgccaaaatcatgtgttaaaacatactgctatgaacacctaaaaagcatgtattaggttcatcaatctaataaggagtcagatttctgtttaactactgcgttttctttaagacaaatgtatcaataaatgggtctcgctaaaataggttccgatgctgaatatgctcatgcatttagaataccatgtagagtctcttgcatcatgttgcatcttatttgcatttatacatcatgccttttaggatttgaattcatattcgctaatcactcactccctttgccttgttaaaattgaagcagacttatccatgtttcacaattatttctcctaaaactagtaactaaaacagacttatccctgctcaaatttttctaaaactaggagctaaaaaacagttgcaattgaagcagtttaatacgcctaggcaagccttagggcttaaacttgataaaactggatatctacttctatgtactgtttggctaataataggtttgaatcaatagtctgaactagtaaaaatcctttctctgagactctgcaataaacctgcctcgctactgtattctcacctagacgtcatgctttaggttctgaagttaaagaccttacttgtgttttagtcgtgcttattatgtgtataacttgtggaggaatatccgagcctcgtattggcctctatgtgtttccccctttgtttgcagtcctaactggtcttgcttgtcgcgtagcattttatcctttaaacctaagggttcatcctagtacttcccctttttaggaacaatagtcctagcctcctccgggattgataggatgggacgggtaatagcacacaatagagttcgtgacccacacacgttttaaataccttcacggggtgggaaagggtagaatatggatatgatgaccggtgcgctaataccacgtgtagctctgtctatcgggtattgcattgatgtgatccatattgttttaaaacctaggacattttctctcaaatgttttacttagttttctttaaattttagtaatttcaatacttacttgaaatcccctcttatgtgagccttactatttgcttattgtccaaaactttcacaaaaccatttggccgggaaccacagttgtggatcctgaggggtgcctaataccttccccttgggataacttgaagcccttacccaaactttggtaatgcaaaatagtcttatgagttaattactctaggtgccctaacgcaccttaaaaatcgttaggtggcgactcttcttttaacaccctcttcccgtttaaaaagagttgtcagaatgtcctgcacacgatctctcgctaagggagggaaaaaaggggggcgcgatagtgacaacgtggtatcatagctctaggttcacgtaagtctcacgagtcatgggcaggcccggtagagtcttgcggatcggtacagagacgtctatacttatattcaggaggctctagggcgttaggaaacctctctttattcatattctatcgtgcaatcaatgatgtacttaaactcattcttctattctctcacagatggtgaggacgcgcacatacgatgttcctgattcgggagatgctaccccgccgctcgaggtcgtggtagaagcagggggagggaaccgacccaaggtaggggatgagggtgtcccaaagctattccatttgcaccaccagaggagcctatcatataggagcaggacgagatgcctccagtagatcctgctccatcagacttcatgacagcgctaggcttccaggaggttatgggccgtatgatgagatttatggacaccatgtcctaggctggtttatttccaggagatcctgccacctcacaggcgggagggggagtccagacccctaccgcccaggccacaggacacgcaacaacaacatatcatacctcgggtatactgcccgtgggtggtatccagcctgtagcagcggcaccggagcccataccagccgcggagggtgatcagtagaagatgttatatagatggactcgattgcgccctccagtcttcgggggtgagcaaggtgaggatgcccaggacttcatttataggtgcagggacagactgcacaatatgaggatcctagcgtcccatggagtggatttcaccacatttcagttagagggcaaagcacgcaggtggtggaagtcttatattctgagcaggccagcagattctcctcttgtcacttgggagcagttcatgcagatgttcttggatagatatattccaccctgtgagagggaagagctgcggggtcagtttgagcagctagagcaggggcaaatgtccgtgacagattatgaggccagattttcagagctgtcacgccatgcacttatgatattacccactgatgctgagagagtgcagaggtttgtagcaggattgtatccaggtattagatccaccatggatcgagagatggagatgtgtactctttattagctcgtagtggagattgcttgcaggatcgagggttatcagtcgaggagcagggagtagggttagcgggataagaggtctaggttctcaggagatttcagggatgccccagctaggagtagaggtcagtttgggggtggtcagcccagcaggccttcatattcagcacctccactacctccctgaggtgttccagttaggccttagttcagtgccatgccagagcgttcctatcgtcctccagccattcagagttcacccagtggttaccccagtctccagagatcctccagttcttatttcagtgctatgctagagggttcacatcgctctccgaccattcaagattcttcctctttgggacaacaggatatgccacctgtgagatgttgtgcggggatttaggccatgtgaggagggcttgtcccaagttttagggcaagacagtgcaacagggttatcagcctatgagttcaacaccagtagtttggtcacctagaggaggaggacaggtcggcaggggtcgtcctagagagggaggccagtcaggaggggatcagtcagctcctgttcaccctggtggggctcagtcttcaggcgctccagccaggttctatgctattccggctagatcagatgcattggcctcagacgcagtgatcacatgtattatctccatatgtggtagagcgacttcagtattgtttgatccaggatccacttattcatatgtttcagccctattttctcattttctggatgtttctcgtgagtctttgggatctcctatatatgtgtccactcatgtgggcgattctatggtggtagaccaggtctatagatcttgtgtgatcacattctgtgggttcaagaccagagctgaccttttattgctcgacatggttgattttgaggtcattttaggcatggattggctatctccttatcatgccgtgcttgattgccatgccaagataattactctagccatgcccgagtcgcctaggctggagtggaggggttcttcagttagtgcagccagccgggttatttcattcatgaaggctcgacatatggtcgagaagggatgtttggcttaccttgcttatgtgcgggacaccaccgtcgagtccctgactattgattcaatgccagttgttcgagggtttcccgatgtatttccttcagaccttccaggcatgcctccacatcgagatattgatttctttattgagttagctccagatactcagcctatatccattcctccgtaccatatgtctcctaaggagttgaaggagttggaggagcatcttgaggagttattagctaaggggtttatcaggtcgagtgtatcgctatggggtgcttcagtatgggtttatgctgatgtgtattgattaccgccagttgaataaggttaccattaagaacaagtatcctctgccgcacatcaatgatttttttgaccagctacagggtgctcgggtgttttctaagattgacttgaggtcgggttatcatcagttgaagattctagcttcaggtgttccaaagacagcatttcgtactagatacgaccattatgagttcctagtgatgtcctttgggttgactaattccccagcaacattcatggatttgatgaatagggtattcaagccgtatattgattcctttgtcattgtcttcattgatgacatcttgatttactcacggagcttgggtgagcatgagcaacatttgagagtggtgctccagaccttgcgagaacagaaactatatgctaagttctccaagtgtgagttctggttagattccgtagcattattggggcatgtggtatccagagagggtatcaaggttgatccacagaagattgaagcagtctagagttggccgcgtcctacttcagctatagagatcaggagttttttgggcctggcaggctattatcgccgatttgtggaggcattctcttctattgcagctccattgaccagattgactcagaagaatgtcccatttcagtggttcgaaaagtgcgagacgagctttcagaagctcaagttagcattgacctcaacaccagttttgacattgcctttcggttataggatgtatactgtgtattgaaacgcttcacgcgttgggttgggttgggatgtgtgttgatgcaggacgggagagttattgcttatgcttcgtgccagctgaaggttcatgagaagaatcaccctgtgcaagacttggagttggcagcgattgttcatgctttgaagatttggaggcactacttgtatggagtgtcctgtgaggtttatacagaccaccgcagtttgcagcacttattcaagtagagggatcttaatttgaggcaacgtagatggcttgagttgttgaaggactatgctatcaccattctctattatccgggcaaggcaaatgtggtagcatatgccttgagcagaaaggtagtgagtataggtagcttggccttcattgcagcagaggagagacctatagacttggacattcaatccttggctaatcatctagtgaggttagatctttcgtagcctcgtctagtcctcgcgtgtgtggttgctcaatcttcgttatagggggagattaaggctcgacagtttgatgatccgtgcttagcagagcttcggcatgcagtggtccagggtaggtccaaggaggttactatgggtgaggatggtgttctgagacttcagggccgcttatgtgttcctaatgttgatggattgagggagaggattctagcagaggctcacagttctcggtattctgttcatcctggtgcgacgaagatgtatcgtgatttgaagcagcatttctggtggaggcggatgaagaaaaacattatgtagtatgtgactaggtgccttaattgccagcaggttaagtacgagcatcagaggccagaaggcctacttcagcagatgcccattccagagtggaagtgggagcgcatcactatggacttcgtggttgggttgccttggactttgcgaaaagtggatgcggtttgggtcattgtggatagattgaccaaatcgacgcatttcattcctatggctactacttatacttctgagaggctagcccagatctacattcgggagatagtccgattgcacggtgtccattatatcggatcgaggtcctcagttcacctcgcacttctggagagcattgcgcagtgggatgggcactcagatagatctcagcatagcatttcaccctcagactaatggccagtcggagcgtatagttcagatattgaaggacatgctcagggcttgtgtgattgattttgggggtcagtgggaccagttcttgcctttggccgagtttgcgtataataatagttatcagtctagcatcgagatggatccattagaggctttgtatggtcggcggtgccgttcttttatcgggtggtttgagcctggcgaggctaaattatatggcacggatctggtgagagatgctttggagagggtgaagttaattcaggagaggctccgcatggagtagtccagacagaagagttacgcgggtcagagggcgcgagatgtagcatttatggagggagataaggttctgctgaaggtttcaccgatgaagggcattatgagattcgggaagaagggaaagctgagcccaaggtttataggtactttcgaggtgttgaggcggatcagagaggttgcttatgagctagctttacctcccagtttatcaggagttcattcggtctttcatgtatccatgctccggagatatcatgccgacttttcttacgtggttgatttaattcagttggatgagaagttgggctacgaggaggagccaattgctattattgataggcaagaccgccagttgagatccaagagagtttctgtcgtgaaggtccagtggaagggccaaccaattgaagaggcgacttgggagtccgaggaggacatgcagagcaggtatccacatctattcagcacttcaggtacgattctagactcgttcgaggacgaaagtttgtttaagagggggagagtgtaatgacccgaccggttatttttgcgtattaggaccccattcccctaaatgagacttcctgtagcggcttgttatgatttatgacctgcggggtcgggtggttcggatttggaagtgtttagagtgctataggaacacttggttccttaaggttggcccttttggccaatttgacttcggtcaatatttttagtaaacgacctcgaaatcgagtccggcagttccagtagcttcgtatgatgatttcagacttgggcttatgttcggaatgggttttctatgacccgggagcgtttcagcgcccaatttagaaataggaatttccttaagtttgaaatttggtttggaacgtgtttttctgttatcgaggtccggatggaattccgagaccgggaatagttatgttatgtcatttatgaattttctgcaaaatttggtgtcattccgagtagtataggtcggtccggcgcgttgttataaaaatcaagaacttgaggttcttaagatatgattttaggggttttgggaggtgattttgagttttagcgttgttatgagtgttccgaaggctcgagcgagtctgtattatgatttgggacttgttggtatatttggacgagggctcggatgggcccaggtgcctctcaggcacccaacagggctaaaaacaagctgatgcagctgctggtgcacctgaactggtgtgaccgcaggtgaggttgcccagcatcgcaggtgcggccctcttttctcgcaggtgcggtctcccctccgcaggtgcgatcccagccccactcacccatttcttcaggtgcgagcccttgctcgcaggtgcgaggccgcaggtgcgaaaacactgtaggccaggcagtgtgttcattaaatacgagagtctttaatttcttctcatttttcctccattgtaagaccttgagagcttgggaaaattactccacgaccaaccaccgtaaggtaagttaattccgtcaaaagttagttttaattcatgaattgctagttaaattacctactaaattagtggaaaatcaagatttgggtagtaatttaggttctagaggaatttgatgaattactcagttattgctatgaatacaagtagacatcgtatgttagagatccttaggctatgggtgagtgattccttcgagaatttttgggattcaagcgtgcgggcctgggtttgaattttgagaattcttcaagaatgttgatttatcaaataaataggataatttccctactttgagcatgaatttatatgattgtagcatatttggctagttacgagtccccgggtatagagttcagagtttcgggcgcatccttagtccgagaggtagcttcgacacgaggtgagtctcctttctaaccgtgtaagagggaaacattctcataggtggtttgtatgctatatgtaactgttttgggggctacgtgcgcacgaggtgacgagagtccgtgtgtagctactatcctgccatgtcaagtagttttaggattcacgagcatgctttatgtgcctattatgtatcgttaggcgtactttgagttgcttattctcttgagctagcatgacaatggtagaaagtttcatccgaatttccagttaattaatctctgttacaagtattgcctctactgaacttattggtaaatttggtatatatatatttatgagttagcacccgagtcgcaggtatgattcgtgatcgggggaagctttacgataattcggtataatgtgtcagcacccgagtcacaagtatgattcgcgagggggggaagaattatgataattctgtataaatatactagcacccgagtcgcaggtatgattcgcgagcaggggaagatttacgaccaaacaagtgtttaagatgtctcccttatgacgccggccggttgtcttattcctgtgtgcgcatgactatttggtattgtttcatggttattgacttgatagaaatttgggggaaaagaaagcagaaattgctatttacttttagtatttacttggatttcctatgctttatacgtatttgatgttcattgtcttacatgcctaccatttttattatacactgttatattatattgttggacctttgtgagtgtcaagtcgacctttcgtcactatttcttcaagattagacgggatactcactagctcaacagcaccatggagtttcttttgcttatgttcccgtctatttatttcagacagtgggattgtacattatccggttagtatgcccatgatactcgtgacactagttcctggaacacacgtagtatttgtgtagattatgtccgtacatatatgcatattttggactcaaaccttattatgactgttctgtttaaaactttttgattactcctaataggttaataatctaagcttgtaacttagtatatatatttatatgtttaaggtaaatgggaaggaccagtagtagtttaaatgttggcttgcctgaccccgctgttgggcgccatcaccacccgagttaggattttaggtcatgacagccagcatgcttgcttaggtgtctccatctcactgatgtctcttctttttatgtagaagatgtgaatccattgaacccacatagtatctttcttagttgtgatagcccaaagcagtttggatatggttgctttattccatgtctggaagtcaatgatgttcaaaccccctgctgattttggcatacatagcctctcccatgccactaatgctcttcttgatgttgcacattgtccggtccaacataatgttctacatgtacttgttattagttgcattaccttccttggtataaaaaataattgtgtccagtatgtttagatctcgaacatgatactcttgattagctgcactttgccactatatgaaagaaatttggtggtccaacatctaatcccggcaatcattctctccaccaaaggcatgcattgttgaattgttcttggatgatagaggaacaccaaggtatttgaagggtatctcaccaagtgcaaaagtgcatttcagatagaatttgatccttcagttgttgctctacccctattatatataaagagtttttttccatattttctttgaggcctgatactgctgaaaaatgttcaaatgccttaaccataagttgaatagacattcgatcagccctatattaagtcatcggcaaaataaatattatgtgttagtttcattttcctacaccttggatgatggttaaagttggggttgtagttcagttgtttcagagatctattttaggtactccattgtcagcacaaatagaaatggtgacataggatctccttgtcgtagaccttttcttgcctccattgaaaatgatagagtaacttacagtcgaaacacactccacaatgatattgacaaacttcactagcattccaaactccaacaaaaccattctcaggaaatcccactcaacaatatcatatgctttcctaatgtctactttcactagacatctgggggacattccttttctattatatcctttgactaattcatggccacaatgtcattatccatgatgttccttccttcaataaaagttgattgtgatggccccataattttgtccactactagtttaagtctggcagtgatcaccttgcctatcgacttatacaaagttgtacatcttgcaatatgcctaaactccttgaaatatatagggtttgtaacttttggcactaaagtaatggttgtatagtttatctcgaggattttaccggtcacaaagaattggagaattgctttaccaacatattctccaactgtatcccaattagctttgaagaattcaacgaggaatccatctccccacggggctttgtcagctggtaagtcattcagagcctgcaatatttcctctttcagcactggtttggtcagaccctgttggtcctccttaatgaggcaatatccatcctttgcaatgttactatttaggcatggcacttttgtggccttagtacccaatagatcttggaaaaatttgatgaattgttgctggacttgtgcatgatcagtcaacattattccctgatcattacaaattgaggagatgtgattccttgcttgtctggtcttcatttgtgcatggaagtatcttgtatttgaatccccttttgctaaccatacaaccctagacttctgcctcagtacctcctcatgaatgttaaaccatttctctaattcaaatatcagacctctctcctcttaaatcaagttggagttgtataggtctgagttcaacaactgctaagtgtcttgtaactttcctcgaatggcctcaactcttttttctaggctagatacttctttatgaagatgttttgtgttaagctcaataagcttgagctttttacatactccatacatagtgtatccagggattttatactgctatatagattgggtcacttccttgaaagcccaattttgaagaaggacattgagtaatctgaatggtcttggaagtattttcttgactctcccagtgctaactataattggagagtgatctgagcaccctggattgtggtatactgtttccagatggccatagctatcaaaccattttgcattcccaaaagcccaatcaatgaggctgtgtattctgatctccgcatccctcttgttaatctatgataatatacttaatgttcttttaagtttcccaagacctatatcttcaatacattcctgaaagtccttaatttcagcgggatgcactagtacaccattcttcctgtcattcactgaaagtacaaagatgaaatcccctaacacaatccagggatcagttatgctattgttcagtgctcttactcaattccatagaaccttcctttcatttatggtattcaatccatgaacaaaagttatctgactagcaaatggtgaccccttatctttaactaagcaatgaacaaattgcagcctagatattaatattttcacttccacctgttgaggtttccaacatatccatattctaacatttggactttgagtgtaatctgtagctacttcccattcattccccattttcttcttaactttctcagccttgttggctttaactttagtctcaagacaacctattagtactaccttgtttgtaagcataaaggtttgagttctttcttggagggataaggtcctttgtcactttcagagtgactatcattggttgaatcctcagagcactaaactgattttgcctcaataacctctcaatcttttcattgtcttcatattgctgactttctccttcctgttcttggatagtatccaacttttccttcccatgctcttaacccgttgcacctgaaattccatatcctccgactattctgttgcattttgtgtagtagttggttctcctacctcctttggtaaaattggttcagcctgtttcttagcagctgtgactggtttgataggttcttgagttactttcactctccaatacatcttatgcttccttttgttcatttgttgcttccctttatcaatttgtgtttccttcttgcattcaaaattgtgatgacctatacttaggaaactttgacaatataaaggtctccattcatattcaatggtttgcaatttgcacttgcctcctggtaattcaattggtatatcctctggaagtgcaagtgagacatcatctcaattagtatgcgtgcataggacactctttctcctatggctgtaagtttatccgtgcatattggtttccccaagaaacaagcaattctacctaggcttcctggtgcccagtactcaataggaaaattagggaatgttacccacacacactggaatggaggttccttactcatctggaattctggctccctttgtttgagaaccattggtctattgttaaaagtatatagccttttgcagcaaggtttccttctctgcctcagacataaatcaaaatataaagtagtcatcgttatgttagaaaacctgaggagttatgacaaaattccagaccccatatacatatttcagcatttccttgaaggaagggtttccccccaattacatagcctattaatgttgatttccatatctggcactgttcttcaacttctgcttgaactatatgaatagtcttcgccccgtctttcataatcagaggaaaatagtcaagcttcaaccctaattactgagatctattaccttgaacaacttcagccgtcgtagtttttctgctttcgctactgtagaaaaggtaagcttccttgcacctacagctaatgaggtatcttcatcttgtccttcaggagtgacaatttcaacagattgtcttccttgtagtagtgttggagcactacccgttcctgttagccattgatcgaattgccttggacctaagtcctgggggactccatttgctgggggaaaagaaagtgtctgctactttctttttgtaatataatagaagatctatatttgattactctaaaaacatatttttatttatttattctattgttctcaataatattttttgaattttaagaaataaatactctttatgcctttacttcaattttattttttctttttttttaaaaataatttttgaatttctaaatttgtaggaggtttgtcctgaaatgtgacacttattgaatttttgttgttacacttgacataatcgcatcaatttgtttctcctattttagacagagtatttttattttaattttttttcccaataatattgtttgaattctaatgaataattacactttttactttgttaagaatgaaaatattttaaacaaaagtaaaaaagaaattaactaacataaaccaacactagtccatgtttgattagttaatttctttatgtcctttttttttccttttctctttttccttttttttaaaataatttttgaatctccaaatttgaaggaaggtttgtcctaaaatgtgacaattattaatgtttgttgttatacttggcatcatcatattgatttgcttctcttattctatataaatagatagtgatatgtatattgactatcatattaggaagaaattactaatcccaaattcaaagataataaccaataattactagtttctaacaaaataactaatactaactaattattccatgtggcttttttcggggctgacacttggcgtgatgactcaaagggccattttatgaattaagacactattatggtcccagtggccttaaaaagactaaatttaattatctcgatttgcgtgcgcagtacgaacgtgaatctgaaaagcttttatgtgaaaatatgagaaatagtaatgtttagagttaaaaatttagttttaattgactttggtcaatattttgagtaaacagaccaaggtctgtgttccgacgatcatgggaggtccgcagtaaaatatgggacttgggcgtatgccccgaattgaattccgaggtccctagccttagaaaataattttttgaagaaaattgttgtgttggttattatagaaaataaagaaataaaataatatgcgaaatttttggtatcgtgcccgtattttagtttcggagctcgaaacaagtttgttatgttatttaagtcttatctgtgaaatttgatgagaatcagagattatttgacgtgattcggacatcgagttgaaaagttagaagtttgagtgttcttgggaattttttttagttttgaggttcaattcgtagtttttgatgttattttgatgatttgatcgcacgagcaagtccgtacgatgtttttagacttgcgtggatgtttggttcggagccccgagagctcgggtgagtttagggtaggctacagagtgtttagacttagaaatttttttgcagagctgatatctggtgttggcaggcctctgatctcacatttgcgagatcaggcttcgcaaatgcgaagtcctaggccagcctcagatctcgcaaatgcgagaattatggccgcaattgcgaaacacccatatgtgcaaatgcgaaaatttcatcgcatttgcgatggatgctaaaattcgacgggttcgcaattgcaaactcgcaaatgcaataaccgcaacctgttaaaatcgattttagacgggtctttcagctccttttcaatcctctcaaaccctaaaactccataggcattttttcaaagacccaaacttctccaaatcattggtaagtgatctctaactaattcctttcattccttaacaacgtttaacaagaattcaacctagaatctagagttttcatggtgaaaattgggatttttgggtagaacttagaaatttcaaaatttgagaatttagaccttgaattgaggtcggattccaaaactaattgtatatccgggctcgggggacaatgggtaaacgagttttggtccgaacctcgagtttagaccaagcgagcccggggtcaattttcatattttgttgagaaaacttaaaaaaaaacataatttttcattaaagatatcacctttagaactaattaatgatgttgacccaattatgattagatacgagtgagttgaaagctaattctcaaggaaaagcagtgcttatgtagtgagtggcctgcgagttcgaggtaagaattgtgtcaaaccttagcttgagggaataggtattgtgtgactacttgttatatgttttgttgctaaatccgatgtataggtgaggtgacgagtacctatacgttatggtcaggtcataacatgcgagtgaaagttaaatcttgttattttggttgttttaaagcctattttttcccccgataaacttccaatttcatttatcaaaattgtcattacaaaataggatctgctgaccagttccttctctattttggactatatacactatcacagtatcttactataatgacaaaacaatatcttatcgcttatgtacaactgaaataagcatataactgaacataagcatttctacactaattatggataactgctcaactcatccatgttctccttccagctgctatgcatttggctcttgacatgaatataagttgctatcttcctgcatatctgatatgctgaagttttccctttttgaaatcgtataagatttctgtccctccataagctataaaccatcatgctaaaaacagataccaggatgttgctttttcctttcctcttctttgcttgttgtaccacccattttaactcctcttcccaggttgatatttgcctttgtacgcctagccaatccaacgatctcttccatatagcttttgtgtataaacattcaaagaacaaatgtttaaacaccacttcatccagtccaaaaaacacgcacgttggactaacttgaatgcctattttctgcaatctatctaccgttggtattctcttatgaatggttatccacacattgaacttatgccttggatgtatgtgagggtgaagaactagacttttccaatctactttctgcccctcaggaatttgtaaattatacaatttcttgatactgaatttacctgctgtggtctgtagagtcttcaatctatctagcactgacccttgcaaatttggtaaactcaatacaaacttccttttctcaatgattttcctgactacccaagtttcactcataggtataagcatgctgtcaatgctcctattctttatataataggcatgtatccatcgaacccataagcaatatttattcattgttatagcccataagtgtttcacaatagcagctctattccagttgcataggttgattacattcaagccccccattgattgtggtaagcacaccctatcccatgccaccaatgctcttctagatatctctgcttgccctgtccataaatatgatctgcaaatagcctttatcatcttgcttattttctctggtaacagaaatacctgagcccagtacgattgcatcccaaagatgactgatttaataagctgcagcataccggaatatgaaagcaattttgatgtccaacacccaatccttgttgtgatcttttctaccaatggccaacactgttggtttgatatttttttacgagtcaatggaactcctaaatatttaaatggtagccttccttcactgtatctcagttcctacaaaatcaaccgctttagtctatcattttttacgagtcattttttcctgctatatatgctgaactcttgtcaaggtttgtttgaagcccagaagctctagaaaacctcatgaatgcttcatgcaacaaccttattgattctatatcagctctacaaaatatcagcagatcatcatcaaaacatacatgcattacacctaatctcttgcatcttggatggaaatggaactcttttttaagagccagttgattgaactccctctgtaagtactccatttctagcataaataagtaaggagacataggatctcgttgtctttttcccctttttccttcaaatggctttgtgagaccaccatttaagagtaaagaataagtcactgttgagaggcattccattatccagcctataaatatttgtgggaatccaaattctatcaacatcctttttagatagaactaatccaatgtatcatatgctttcctcagatcaactttcagaatacaccttccagagatccctttcctagtgtatcctttgaacaattcatgagtaaacagtatgttatcagttatattccttccctctataaaagctgattgagaatcccccacaagataattcataacttcctttcgtctacctatgatgatattagtaataattttgtacatggtagtacaacatactattagcctaaagtcctttacctgagtaggattaggaaccttaggtattagggtaatagcagtattgttaatagcctttggaagcttccttgtgctaaagaaatccatgacatctgcaactacatcttctttaattctctcccattgctgtgtaaggaattccacttggaatccatccactccaggagccttatctattggcatgctcttgatggctgcttctatctcctctactgtaacttctttgatcaggtccaattgttgctgtcttgtaagacatgaacctcttttgataacctcagcatcaggacatggatgcactggtgatgcttctcccatcatatttttaaagaacttcaaaaattgttcgtccactagttttggatctgtcaattagtacctgcatcatcatgaatggaaataattgcattagagttagtacgcatcttcaattgagcatggaagtattttgtatttgcatctccttgctgaatccatatagctctagatttttgcctcatcacttgttcctcaatattactccagttttcaacttctagcaatgcttccttctcttgtttcactatttctccccttaaaggttgcatagataattgatgttggactaactccagtttttgctttgcttgaatcaatctcttctgataatttgccatataagtatccagtcccttcaatgcctcctttaatcttctaagtttacaccatgttctgcctctatcttccaccatttccttctgcttccaaactccttccactatccttgtgaaatcaggatgatggaggacattatgataaagtctgaatgttctaggatgcaaacacttatttgttaagcccattttacaattcatcaggatgggggtgtggcagaaacaccaggattaagatattcagcttcaatagtcccattgttcatcatccaattaaaatttccaaacgcccattcaatcttactatacaccctagcattgtcatcccttttattacaccatgtataataccaccatgtactcttcaaaggtgtgatatgcatttcatccacaaacttcttaaaatcttggacctctgcaagtgttataggattaccaattctgtctttctgcttgcagtccattgttaaaatcaccactaattagtcattcactagtgatatttgaccctaatctgctcagcttctcccataatcctttccttgaattcaactcattataagcataaactacagtgaatagccacttcttctgattatttggtcctcaatttcacaatgaataaactgtgcatcaacttttagaatatggatatgaatatgagccttccacattaaccaaattctttcattgtatgcatcatcatagttacactgcattttccaatcctttaacaccttctgtgctatttttttttaaactttattctgctttactcttgtttcaataagtcccattacctccaccttatacttcttcataaagagtaccaactccttctgtttaaagggcttattcagccctctaatattccaagtactgattatcatagtgttttaaagcccattacttatgattaatgttgttattaaaatattgaaaggttagtatccggattcaccgagatggataatattgtgaatactgagttgagacttaaatgataaatggcaatagaaactatgatgaaacactgatttcttgtgaaatcctttgtgaatattgaattgatattgaaatggtaaatgatgatagaaactactgtgaagtactgatttcctatgaaacccctctttataagttgtaatatttctgttattggtgaggaagagtgtaaagcacgaatggtgatgccgtgcatgaaatatctatattgtgaggaagagagtaaaagcatgaagggtgatgccgaggccatgacagtggccgaggtaggggcaggacccagcccattgctcagacagcagccccaactgtggagccccagattgggattaatgatggggttccagctcagaccgttccagcgggacaagctcggtcgcgaaggggtttattgccaccccagtgcttcaagacgccttggtccgattagtgggcattatggagagtgtagcctagactggcacattccccatagcagcgaccatatcttaggctggaggaggggttcagactcatgttactcacactcctaatcagctactcctcaggttcagaccctagcagctaatctagttggggtaattcagctagttgctgcagtgccgcctgttgaaggggcagctatgtccaccgatgcattgtggagattggacaggtttattaagcttttccctgtttatttaactggtaagacttcagaggatcctcaggaatatattgacaactgtcatgaggtgctacggaatatgggtatcttggagacttatggggtcgactttgccgcttttcagataactggttccgccaagaaatgatggatggattatttgttgactagaccaactgggtcactttctttgacttgggatcagtttcacatctgtttctagagaagtttttgcctgttactactagagaaaagaaacgtcgtctatttgagcgacttcagtagggcaacatgactgtgacccaatatgagaatctctttgtggatttggctagacatgcaattcttttgttgcccatagagagagagagtcagacgatttattgaggccttgctcagcccatcaggttgcatatggctaaggagacaaggaccgagatttcttttcaggacgcggctaatgtggccaggaaggttgagacggttcttgggatgggaggtcaggggtcagacaagagacctcgttgttgatactcaatttttttcccctcaaactatttgcaaatttgcatataagctttctaaattactcttcgtaatattgagtatttttccttatttttcatattttattaagttattttcctgcttcttttaaatatttcataattaaataatacataaattatgctatgttttcaaaaatatttcccagcctagtatgttatttttatccaataaaatccaattatttcacaaattagccaattgtgccttatttaattccaattacaacaattttgtaattatggcccaattggacattttatattatattaattcgaattttatgtatttttgcagttaatattagttaattactgtaattttacctattttagtttaatttcatttttttaataattattggctattttaattaattaattatctacttttagtgggtatttatcagctagccacgtttatttaaattatagacaattttagcctaacctctttaacccaattaatcccaacccatttgacccaattaacccaagacccaaacccaattagcccagcccagccattttattttacccgacccaacccccaaatcaatctgagccattgatcagattagatcaacgacctagatttctatttccttaactaatccctaacctaacccccctccccgtctcatttcgagaatcctcactctctctctctctttgtctcttcttctcccccttatctctagaaccttctggttctccgtcttctccgatggctttcttcagccacttccaggctcacctccttcgaccaccaactgccttgaagccttatctctccgatctcttcaatctctgagacctccatgagctccgaccgtgccagaccaccactggaagctccgcctaaggccgtttccggccgtctccaatggttttttactcaagggtgctctaaacgccattgtcctaagtttcacaactaggtttttccttacttctctctaggtttctcacgaaactctaatcctgatccaaacctttaaatatccgtattttaattattttcgactcatttcttcctgttttgaatcattatctactcgatctttacaaatattcaagtttaaaacgcttttgtccctttttcgaaactagggtttctcaacccttttgaaaacgctttattttctagtttttagtgctaatcttgagttctagtatattttagacatttttcctgcttaaatttcatgtttatgatgaaaccccagctttagggtttgtattcgtattatgttcatcatgtttgcttttctgtgtgttcctttggattcttctcggagttctatgctccctgcttaattttggtgctagtatttcaatcccctattgttctgtgttttttgcttatggttttccttgatattgttcaaaatgggctatatatcgtttagtaaacttgactatccatcctattaattgtttacatggtgattttatattgattcttacgagttttctttaaggctgtggtactttccttcatagctatgatttcatgtattttcctaatgactcttggctgatcttgaattgtttccttatttgtgcaaaactttcctttaatttggtattgattcccttgatttgaatctcactcgaggatcctttcctgtgacagcatctttactaatttccttttatctcttgccttattatgtggttgactatgctgttaatcgattcttacactgtttacttaattagagtattatgtatctagcctaatttgtctgctctatacttgctgcttgaattatttcctcaaagctatgtacaatctctttccttatttgttacctgcttattaccgtttgaagctaaatcccttgagttaagggagtacttagcttaatttcctgacttattgatttcgagttccttcaattactacttgacttgatttttaccttattcatcacttgtttttcaactataaatactctgactcttcactagaaagaggactaacactgagattcatattgaggacattgatacattgcacaacacacacaacaatacacactattctctcttgtgctcttgctctctttctttctctgttctactgttgttccctgctcttgtctcttagtagccagttgtaagccaaggctactattgtgttatcacttgctcttacattctgatgttttcttctatcatctggtatgttataattagttttccaaagctccaaaccaatttgtttatttatattttagtttgtcatattcctaattttcttctacctatgtttctactgttcaacatgtaattaactccttgtttgcctgttgatactcgccatgtttgcctctttacatgtctatgagcgaagtcaatacttgttataaaccttgcctatttctgtatacatctgttaggttatttcttttcctattcaagtatcatgtgtcccctgatccccctgaactgtttacctgttattgcttatcctacttatgacatatatgcttatgaccattgtttgctcctaatcttacttgttataactgtctcctgctactgtctactaccatgtctacacttagccatttcttggtcccctgaacctctttgattttgtgtactcatgcttagtgagttttcataagtctctgtatctcttggtgttattatgtgatctattttccttttgccccactatccttgtgtgcaatcctgtattgctgaacttttgattaatgtttctgtttattttaagctaatctttcaaaaacaactctccaattatgaaaactctcttcttaaactatgaactttcctctcttccctgcacttcacactactcttagaaaattaggtcctacccccttcgtgtgagcattgccttgagtacccctgggtgctcatggaacattgacacacaaggctggtaactgtacactgcacttgttaaatcttggtaatttgcttgggttctggtattggccagggatccattgggactggggagctttgccacacacaggccattaaggctgtgaaactcgaaaggagtgatgctgggagattgggcctggttgaaggctccctatagaagtagcttcttatttttcatttcattaatgtaatttattattattggcctgtaataatttgtaaacgaatattgggggctggatagtgaatgtgtgtgtgtggggggggggggtatgcatgcttagcttaggtgataggtagaaaacatgcctataggaatttatttgtacattagataacttgtataagacatgcatctcacatagtagaaatcttgttttaggtctttcactttcagcatgttatcatcctcatcccataatcctgaaaagtcaataacaagcataataaactgtcataaggtcattactgcatcaccatcttagaaaccatgtgttaggaacttctatgtgcattagatatcttgtggtttaggatcttatacttgtttgaattgcaaatcgttgaaacgcctaattagcatgcttaatctaataaaatgcggttagcctacctgaaacattttctgcaaatatattctttaaaatcagaatccaaatatgcatgttcaccttttgagatagttagccaacgtatacgagcctaggaaactttaggccgaatgcaataaaattaaaccaattatgtttagggctaatcaacctctttaaccttttgaaccctgttgctcccattcttgttttacctcactgaggttcactttgttttactaaaactctggctctattttaaaacagtctcgaaattgtgcattttcttccctcaggactttctgggttttgcactgttatgctttaaactactgggttttcaaagatacttcactccactcaaaatcgtgccattttgaacccttgctctggatatttaaaactactgtatttttggtaccacctattactccttcagtgcaattatctttaactaccatatatgttaagctactatattttgggtcacttatcactatttttacttcaaaaccaggactcaataattttcggccatgtttcctgaaagctttaaatcattgtacttctgaattttaccactccccctaaacaactgcatttctaaaaatcaactatttctctgaattactccttcattaagttttccaaatcaaactcctcttgcaactcactgttttactcaaaactctttttttaaccctatctctgagactttaagtgtgtttgagacgtgccaattgtatgtctatccgtggaggaatctatgagcctttatttgcccctatgtgtccttttatatgtgaggtccaacttgttatgcatgtcgcctaatattttatcctttaaccctaggggttcagcctagtacccacattgtaggatttgtagtcctacataccttccaggactcataggatggggcgggtaatgacatgcaataagcattcataaccaacacacgcattttaaataacctttacggggtgggaagggtagaatacagatatgatgaccggtgcactaatatcacgtgtagtcgccttttcaaggtgtgacatatcgggtattgcattgatgtgatccgtattactttaaacctaggatagttcttttcaaatgtttattctaatgctttctccaaaacctttaaagattttcatgacttgttttaaatcccctcttatatgaacctcacttgctatttgttcaccgtccaaattcacaaaacttcttggctgggacccatatttgtggatcttgaggggtgcctaacaccttccccttgggataatttcaagcttttacccaatctctggtaatgcaaactagttcatgagttatcaattctaggtgccctaacgcaccataaagatcgttaggtggagactcttccttaaaccctttcttttaaggagttgtccaaaatgtcataaaactgatctcttcgtacctaactcgtgcgatagaaaaagggggcgcgccagcatggcgactctgctggggatcttccttaggattataccattacaatctactttgtggatttggacatttaattttcatttaaatgattacaccttttcctattccctgttatatgctgttaactgtttactttttacaagtatttatttcacctgaatgtaactgacatatctttatgttttctttgtaaccgcttttccattataactgttgtattttctttctttattgctttcctcaacgtgaaaatacatgcatatttgtttaaattccatttattgcatatcatgctctacattcatattctactcgtgccaaacaaaatcctatagcaacggttacaatgagtggttgcactattccaatattatcaccccctaaattcggaaaggcgtatttgcagtaaaactagtcgatcaccggtgcagtcgacagttttgtgccttcccccttgagttgtccgcttaagggtaccagtctaaaaccccaataaaaaccttaatctattgtatggtgcatgcatcatggtcaaacctagccaggataatgtgttgtccgcacaataaccattaagatagtcttgtccaaagtccgttgggtttccctggaacccaaaaggacgcattcacgttctgtgcatttatttggagaacttaaatgctcatgctaattactgatgttaaatagtcgagtccggtgggggtaagggcctaacctgtttactttgcagagatgagacacgaggtccccagattttgcatggtcaccaacatccacccaaaacttctgaattggtgggaagacttgcactcaagcgacaaaacaacagtcagaaaacacctggtaaaccttccctctctcttggacattcagcctaataacatggtgatagaggctgccaccttattatgggactgtgatcggtcggtttttcgatttgggaacaatgagatgacaccgttgctagaggagatagggggtttagctggtttgccttgggagtctcaagggttattgatgcctgaaaaccgaacatgccgaggttttctcaagatgatgggactcaagaagaatccagatttagtctgcttggaagaatcgtacatccccttcgactacctgtacgagaggtatggccgtagtcagtcttaccacacatatcaagaagaatttgccctcacctctataggacacattcaccgccaggtatgcgtcttcatattctgctttttgggactgatagctttcccgacaaagaaggggagaatccacaccagattggctatggttacatagactttgatggaagggatagacggacaggatttcaacattgtacctatgatcgtcgccgacatataatgatctttggagaactgtcaacgaggagcgaaacattttgagggttgcaacctactactccagctttggctcaccgagcatctgcaaaggggtgactaccgtcaagacatacataggagagcttgggtgatcatattgatttccatcatccaaagagtatgaactacatcctcgacatgtttgcacagccggagaatgccaatggatgggtcgagttgttggaaaatctgaccgaggatcaaatccaatggatgttcgagtggttcccgaccgacgaattcatcattcggactagagacactctgttcctaatattgattggtcttagagggacatacccttatgtcccgattcgagtcatgaggcaggcagggaggaagcaagtcatcccaagggtcgagaaaatgagtcatctcagggcggactttcaagatgatgacaaccctcacaagtgtcaagctcagcaattgtggcactgcaggatacagttggagaaggatactatcgagctcgacaggtgtcacgctggttgctctccttattatcagggatggttggaagataactggggaggaagtattgagccaggattcgctcgaggacatagggtcataaatgataaagctgaggcaacaactagactcaaccagcttcgcaaaaggctccgtgactgtgaggaagatcatcacaaaatccacatagccaacaagaagctgatcaaggaatggaaggacatggccatcacttccacccagaggctagcacatttggaacgaggcatagttgacctggaggaaaagttccttaggaggatcgagacttgtcaaaagaccgagggagctgaagcggtaattctagccaagacctacttgctgctagggctccgcgagatgggaatgtattaatgggttcttcttcttctctatcattggtttctactttgattatgagtagctagacccattatctagggttgtggctcaaccctagtgtgggtatgtaatgggtttgttaaattaaggttgggaaattagtgggtgttggctatttaggctaatttggtgttgttattgctataattggtggttgcaaacactaattagccctttcatgacttgggtctttcttgagaaagaggacttgagtctagaaaattatcctaatgggaaattagggcattatcaatagattggtagtcccaatcaattgggttgaacccagaaatagtaaaaccctatgagccctaattaacgggttaaacctcgagagagtaataccctacctaagccttacttgcttgcttaattgacacccaattggtctcgtgagattcagtttgggtaatgccactcaaactaccgagacgtatagagtgggcacctgagtgcattggctatatctgtattccctagtgaattccccgaccttagacttgaaactcgtcgcatatccaccttggcaaaggtcacgaccctagtgccttgatcaatgtaagaaaacaccaacaaaaacagcacaattattagttaatacaaaatccttagaactaatcttagtataattcaacccaatatgtttagaagtgtaattagtaacactcttcccttttagctcacttagacactcactcccatataaagactctctgtggattctatctcgaccttctcgggtaaaagctacacgacccgtgcctacctacttatatagtagtgttggtgggacgtgaacactttttggcatcgttgccggggactataacggtgtgactatcttagtgactagaagcgtagtgtgtttctctttccttctgtttttgactcttttgtttgatactattcaggtaatatggttgatcccctgggcaacgtgatcctggcagagggggtatttgatgaccaagaggaggaaattaatcaacctcctcttcaaagaaggggccgacaggccatcaaccaagatgatatcccagaccctccgccacctccacatcctagagtttcccctcgagtcctgcaaacgaggggtacgccagtgccatagtcccgccgaggattcgggcggggaactttcaaattaccaatgtcatgctcatcctccttgaacaaagagggtatttcaccggagctgcgcatcaaaatgcctacaagcatctcaaggtcctcgttgatacttgttgggggagtaagcaaaccaacgtgtcggaggatgctcttagactccgagtgttccccttttcactttgaggaaaggcattggattggttggagcgtctcctaaatcactctatatctacttgggacgagcttgcggataagtttattgccaagttcttttttccaagccacatggcgtctattcatgattagattttggcattcaaacaagagccaaatgagcgattacatgaaatatgggagcgctatcggaccatggtcaaggagagtccgaataataacatgaccaaggctatgatacaacaaaccttctactggggaatcaatacagtgaatcagtgtgtggtaaaccaattagccgggggtaattttatgaaactcacctacacggaggcatgtgacattcttgatgaaatgaccgacacttcttcggcatggcaaattagggcaaatgtgcctcaaggggaaaccggtataaatagcctccacaaggacctccaagaacaagggcaagcaattcccgagcttacaacaaccatgaaccaacttgctaaggaccaactccaacaattgcaagggccggagcaagtgaatgatatggaaggagttaatgtgcaaaggagaccctgggggaatgctaggcaaagccatggagatcaaggtgatcaagggacgagtggtcatgaccaagatgaggattttgatgaccaagatgaagacgtcatgtatgccaacaattatcaagggcatggtaatagtcaaggcaacaaccaaggttggataaatcagggaaatagtcaaagctggggtaatcaaaggcaacgaaactggaataacaacaattctagaaattggggcaatagtgttgatcgtcaatggaacaacaataatgacaggcaataggggaacaacaacgaggagagttagagtggaagaattaacaacaacaattgggtaggtgaaggtagtcgggggtcgggctttcaaaggcccccgatgtaccaacaaccaagcaaccctcctccatatcaatctcagggtcaaagttcttcaagctccgacatgagtaaaatagagagtgcccacaatacttctatccggaatctcgaagtgcaaatgggccaaatttcacatgccttaaacacacgcccgaagggtgcactaccgagtgatacggtggtgaaccccaagggtgggaataataacaataccggtcacgccatggcggtgactataaggagtggaaaaggtggtgaagcaagtacttcggggcaaaagaagattattgttgatgatgaagacatgcctcaagaagaatcatcggttgatgtggaacaagtgacagatgagccaagagaaggtgaagtaagacttgacattcatgacaatggggaggacttgaaaaagaatgttaacccatctagggaacacataattgacatgccggaaccagctaggccacctcctccctaccctcagagattagcaaaacagaaacaagaaacccagtttaaaaatttctttgatatgatgaaaagtcttaccataaatgttccattggtggaggctttggagcaaatgtcgggttacgctaagtttatgaaggacttagtgacaaaaaaatggtccatggagtgtgagaccatcaaaataactcaccaagtgagttctatcattcactccatggcgctgaaagttgaagacccgggtgccttcactattccttgcacgattggtagtgcagactttgcaaaatccctatgtgatcttggggcaagcataaatttgatgtcgtattctgtgttcaagaccttgggtactggacaacctagggtgacctctatgcgcttgcaaatggcggatagataaatgaagaggcccctaggtattattgatgatgtcttggtgagagtggacaagttcatattgccggaaaattttgtgatcctcgactgtgaagtcgattttgaagcccccataatcgtggggcggcctttccttgccacgggtaaggccctagtagatgttgaagcgggagaatcacattcagaatgggtgatgaaaaagtggtcttccatgtttgcaaatccatgagacagcccaacaacactgaagtttgctcttttatggacctcatttatgaggttattattgatgatgccagtgcgatgatcaatgtggatgaccctatggagttggcattgttgaatcacgaggactcagtggtagatggtattcttgagagcacccattcccttcaaggcatgggttcctattcttacactcccagaaaattgtccctggatttggagaacaggaagaccccgccaacaaagccatcaattgaagaacctctgaatctggagttgaagccacttccttctcatctcaggtatgagtaccttggtccctcttgtactttaccagttattctttcttctttcttaacccaagtgcaggtagattcaactttgaaagtgctaaggaggaggaagaaagagatcgggtggaccttggcgaatattcggggtattagccccgccttttgcatgcacaagattatattggaggatggtgccaaaccctccgtggaacatcaacgaagattgaatgaagctatgcaagaggtggtaaaaaaggagatcatcaaatgtctagatgcgggtgttgtctacccgatttcggacagcgcttggatttccccggtccaatgcgtcccgaaaaagggtggtatgacggtggtcaagaatgacaaagatgagctcattcctactagaacaatcaccggatggagggtttgcatggattatcgcaaactcaacaaagtaacccgaaaagatcattttcctttaccattccttgatcaaatgttggataggcttgtgggtcgggccttctattgttttctcgacgggtattctggatataatcaaattttgatcaccccggaggatcaagagaagactacttttacttgcccatatggcacttttgcctttgctcgtatgccattcgggctttgaaatgccccgagcactttccaaagatgtatgatgacaatcttcaccgacatggtggaggactttcttgaagtgcttatggacgactttagtgtcgttggggattctttcgacgaatgcttgggtaatcttgatagagtccttgctcggtgtgaagaaacgaagttggtcttgaattggaaaaaatgccattttatggtggaagagggaattatgttgggccataagatttcaagaaatggtattgaggtcgacaaagcaaagatagaggttatttcaaagttgccaccacctacttcagtgagaggagtccggagtttccttggccatgcgggtttttatcggcgctttataaaagacttctctaaggtggtgaatccattatgcaagttgcttgagaaggatgataaattcaattttgatgagcattgtatgcatgcttttgaactcttaaaacacaagctcactactactcccatcatcacggtgccagattggaatgcatcatttgaactcatgtgtgattcaagtgatgttgctgtgggggctgttctgggacaaagggtgaataaagtttttcatccaatttactatgccagcaagacaatgaattctgctcaaatgaactacacagtcacagaaaaggagctgctagatatagtcttcgccatggataagttttggccttccttgatgggtgccaaggtcgtagtccacaccgaccatgttgcacttcgttatcttatgacaaagaagtattccaaggcaagtctaatgagatgagtgttgttattacaagaatttgatttggagatcgtggaccgaaaggggagtgaaaatcaagctgccgatcatttgtcccgattggaggagcaaggacgtccttgtgacggacttgagatcaatgacagttttccggaggagaaactacttgcaatgtcaatgaaagaaatgccctggttcacggatattgccaattacctcgtcaccggagttgtcccttgtgagctctcttccaaccaaagtaaaaagcttagaagggacaacttggatttttattgggacgagccttatcttttcaagatttgtaccgacggggtgattcggagatgtgttccggaagaagagaaactagctatccttgagtcttgccactcctcactgtatggtggtcatcacggaggggcgagaacagcttctaaagtgcttagttgtgggttcttttggcccacctactataaggatgctagtgaactagtcaagagatgtgatgaatgcaaacgagcggggggaatttccaaaaaggatgagatgcctttgaattctattcttgaggtagacatctttgatgtttgggtcatcgacttcatggggcctttcgtgagttcatgtggaaatatgtatatattgtttgcggttgattatgcgtcaaagtgggtggaagccgcggccttgccaaataatgaagcgcggagtgtggtagcctttctcaaaaagaacatcttttctaggcttggtactccgcgggctattatcagtgacgggggctcacatctttgcaacaaagctttcgactccttactttctaagtttggggtcaatcataaagtcactaccccgtaccaccctcaagctagtggccaagttgaagtgtctaacctggagataaagagtattctttccaagacggtcaatgccaatagaacctactgggccaaataactagatgatgctctttgggcttaccgaactgcttacaagacaccaattgggatgtccccatatcgtttggtcttaggaaaatcttgccaccttcccgtagaattggaacacaaggctatgtgggccttgaggaaattgaacttggaatgggatgttgttgcaaacctcagagtggaacaattgaacgagttagatgagtttagattccatgcgtactcaatctcgtccttttataaggacaagatgaagtacttacaagaaaaatatactcgaggtaaagagttcaaggtcggtgacctggtattattgttcaactcccggttgagattattcccgagaaagctcaagtccaagtggagcgggccatttgaagtagtatgtgttactccatttggggctctcgatcttaagaacaagagtggtgaagtattcagagtcaacagtcatcgggtaaagcattatcttggaaaagtcaatgatagccacgtggtggccctccttcatttgaagtgattgtggtatcatgcgtcgtgccgcgacgttaaatcaggcgcttcttgggaggaaatccaagtgtctttgctttcatttttctttaattttcttgttagaataggtttcactattacactaactgattgttggatgtgtaggttgattttgacacaggaaatctagctaagtatggaatagggaactctctgatgtttgcttcacggccgcagtcaatatttcgcggtccgtgaagctcttcgcggccgtgaagctcctttggggcaaaattttgacgaagtgtcaaaaatacaactctctgttgtttgcttcgcggccgcggtcgatttttcgcggtccgcgaagctcttttggtgcaaaaatttgactaagtgtaaaaaatacaactctctgaagttttcctcgcggccgcggttgatttatcgcggtccgcgaagctcaactggtccaaaacatttttctaagtgtcaaaaagaggcttctctgaagtttgcttcgcggccgcgattgagtttttgcggatcgcggagtccaagtgctcaaaaatttgactaagtgtcgaaatatggcctctctgagcattgcttcgcggctgcggtccctttttcccggtccgcgaagtccatttgttgcaggcccaggtcgtttcagtgaccgcggaccgcggtccgcggtgggtaagttggaccccctctgttttctataaatagactattagggcttcatttcttactttacgcacttgaactacccagagcatctttgaactgtgtcttcatcctacctcacctgaacttcattgcattcatccaacacttcatccaagcatctagtaagtgcatttgtgattagttaacttctttattttcttattttattcattaattggtaacttcttctcttcttctcatagatttttcacttttaggctttcaaaatgctagggttagtccacaaatgttcattttaggcccttggtattcaattacaccgattaaatacataggggtcaataattgagaataaaacagtaaaatctggaaaccctaagtctcaatcatcttcgcggtccgcggtccctttttcgcggaccgcggtccttcatattgcaatcctggtatcagtttcgcggaccgcggtcgacttttcgtggcccgcggtcccttttgctcttcatgctacctctctgaacctcaatcttcacggccgcggttgccttttcgcggtccgcgaagtgaagattcagagagatgtttttcctttgagtcaaccaccgcggtccgcggtcgactttttgcagtccgcggtggtccttcaacaatacagttgttcttcaatattcaatgtatcagtttgtactacattattttggatactaaccatatctacttgtgtttgtttgcaaaaaaatggttcaatcacgcggcggaggtcgtaaaccaacaggggagaaaagtcctcccgagggagaggaaagacaatgaggaagctaactcctcaagtttgggaatctattaagcagacaaggaaaattatccagaaggctgacaaagcggcttctcactctgatagtgactatgttccttcggagccctcttctgagtccatcccggagtatatagaggaggactcctctacattcagattaaccaatgaaccttcggatgattctccccctgcccaagaactagcccgagcaccggagcaagaatttgcacatgctgagtcatctaagggctcagaccatgaggtcggtcacacagacaccaactcctcgacaacgtccttatctgatgaggactctagtaatgacaatgagggtgaaccacaggtggttgagggggttgagaagactcgcaatccggatgcatggcaggacagatttgttagtgaatcagcatttcacatgttcagggatttgtggacttcacgctcaatcattccggagcggactttttctattaaggagttggcgacttacaaccctaatgtgaaacaacagttctgggaccgacgagggtggacttacttcaatgaatatcttcctgatgctaatgaacacatagtgaaggagttataccccaatctcctatttctcgaaaaggactcaaaggcatctcaggtcataaatctcacagagcccttcgatggaaagtcaataaatgaatacttggagatggatgatgttgatgattacttgtatcgagagcggttggctgaaaaagatgctgctagaaattggttggatttgcacttggctaggctcggggagactccagagtggctgactgctgggaagaccatcactaggaagtcccttaattttgaagcaaaagggtgggagacatttttctgcaacagaattgacccgacacatcatgatcagacgctccccctcagtcgggctgtactagtggcatctatcatggctggataccccatcaatgtggggaatgtgatgtcagaggtgattagccaggttgtcagcacaggtgacacttcttaccccttccctcattatttgactctttattgtcaagatcagggggtaactaagaagaggtttgacaacaaagtaaagcccatcaagcccttctcttggtatgatcttaaagatgatgacaacccgaagaagaagtcaaagggtaagtcagttgcttccattggccagtctgatgagctagtggtgattgaggcatcttcacttccccagccatccattcccgaaggagttccaggcccctcctcctttgccggcacagacatcccatccaccagagcctaccccatgactgctcacaggctgaaccagactctcaccagcctcactacttggatgcagtcagcatcaacaaagctgactgcaatttctacagctgtggcagccccaactactcctccaccatcgcaggtcccacattccgttgaggacgccctaaaggagattctggacaaccagcaaaagatcttggaagcagttggtgcccatgagaaagcactaacacagttggccaaagagacaaagaagctgagaaagactcgggcatcgaagaaggaggtagcaaagttgagaaaggaggtggatactctcaagggggatcagatacccttggagatattgctagcagatctcgctgagcagccacaacagccttcacaacagcagcaacagtcagtgccggaggaagatccgattaggcctctgaagaagaggaagttgatgccccgtcctcagggcatcaagtttgttttggcagaggcttccactcagagccaggaggcccagcccacatgagctcactctcaggtagcagctgacccagtccctccacaggcccagcctcaggcaacaatagcagacccgacacttccattgtctcagccatcatcagaccctacctcttcacagattcagcagcagcaacatggaccacagccggccgagggccaatagggagttttctctcttctctatctctcccattatttttgatgttctatatttgatatttagcattgaggacaatgctatatcttagttgggggagtggccctgttaggcatttgatatcatgggttgtatagttatgacaatatttttctttcttttctttactttatttccattttggtactgtagacttttctatttttggtatgtataagttaattatccattgtaaatattcatcccctatgtatattcgtctaaattcccatcatgtacatattcattctatcccacgcactttactttacgcactttttattttatagcttcttatttttcttttatagcttcttgtttagtttccgcgcgggcaataaacctttggttttcttaacgccacggttctttccaaaggtggatttgtttgaaccaggtggctcttcccaaggatagatggtgtgacaaccttcttaagggttgagtctgttttttttctttctttttgtttttggttttggtttttcttcttttttctcctttttctagttagtgaataacggtgcctcaagagaagcttcacttgggcctaacacagttgcctttgatcccatggtcaaagacaaatcgttgtatttaggagggtgatggtggggatcttgagactcttgtgttgaccggtattcatcgggtggttcttcgggaccatttttgttactcaaaacacgaccacggtcgttgtgggccctcgactcggtttctatggcaatcctctagcattgagtggtgaggaattcgaattccaagtctaagttccatgccacaagtctagaacttgccctgtgtgttgtctaggcgaaattctaggtgtaacttgacttgagaagtgactataggctttctgtgacttgaacaaaattgaaaacttccatggccttccaaaagacatgttccctagtcaacccatttgagccttaaacccttctttcaataaccaagctacaagacttcaaccattcttttaccctctcctggcacccgatctttccttggtgctaggcagaaagcataagtttgggggagatacgggggatggaatgaagtgaaaaagaaggcacaaaagaaagaaaagagaaaaaaaaagcaaggaaatagaagagaaagagaaaagcttgaagaacaaaaagaaataaaaaggaattgaggaagaagaagtgttacaaaaaaaaaaggggtttggaatgtaggaaaggaaagtaaagtgcctaaaatgaacaaaaatgtttgacagtgtgtctctccaaccctgaaaaggataaaatgatgcaaaaaggcaaggaaatgtgagtagttaaaaaaatgaagtgcctaaggacagatagaactcactttgaccaaatacttcctacccttgaccaaaagccttcatgatgattccacaaaagtcctgtatgatctcaagtcgagtgaagcctacattagtggtgaattacgcaaagggaaagcctatggtactttgagccggtcttggcactttttcttttatgagagatgagggatgccctatattccttgttctgagtgttattattctcaaagtgaggtattttgggagagtcgcggaataagagtctgggatccacactgaccaaggtggtagttagagtcgcactgatgatttggaacaactcttgaagctctagtatcacacttgaaactatggttttaaaatattcaaacaatgtcaatgatgcatgtgtattaagggctatggttagtctcaattgatgctagttgaggtcaccattaggacaaccagattttcgaggagtctatctcatgggtggggcttattttgtttgcttgaggacaagcaagagcttaagtttgggggagttgataacttgaatttttgcctcgttttccattcctctttaccttagtcttggatataattgtacgcaaaatagccccgtgagcttacacattgtacttgttgcaagattgaaccagaaatgaggacatgtagtccaaaacatgctcaaaacaggagtgaatccgacacaagaatcaaggacaagaaaagttatcaggcaatgagtcttcgcagccgcagtcatgctttcgcggtccgcgaagatcaacttatgagaaccaacattcaagggaagacctcttcgcggccgcggtcattatttcgcggtccgcgaagatcaacttctgagaaccagtattaaaggcaaggcctctttgcggtcgcagtttcgcggtccgcgaagatcaggttcagagaaccattcccaaagcaaaatccaccgcgttcgcggtcctatctttgcggtccgcggtggttcaaattcagcaagctacagttcaataccaagtcaagtttcacggaccgtggtcgtattttcgcggtccgcggtatatcctcaggggcaattttgtctgaaaatttggccgagtataaatagactattttgtaattttttaagacatcggggaattttcagagctgaaactcgttcttgtacctagggtttttgcatatttagctttgttcttgatattttaacattggaatttcagttttcattgttaattatagattaatgggttcttcttcttctctatcactggtttctactttgattatgagtagctagacccattagctagggttgtggctcaaccctagtgtgggtatgtaatgggtttgttaaattaaggtttggaaattagtggatgttggctatttaagctaatttggtgttgttattgctataattggtggttgcaaacactaattggacctttcatgacttgggtctttcttgagaaagaggacttgagtctagaaaattatcctaataggaaattagggcattatcaatagattggtagtcccaatcaattgggctgaacccagaaatggtaaaaccctacttgagccctaattaacgcgttaaacctcgagagagtaataccctacctaagccttacttgcttgcttaattgacacccaattggtctcgagagagtcaatttgggtaatgccactcaaactaccgagaggtatagagtgggcacctgagtgcattggctatagctgtattccctagtgaattccccgaccttagatttgaaacctgtcgcatatccacctaggcaaaggtcacgaccctagtgcctttatcaatataagaaaacaccaacaaaaacatcgcaattattagttagtacaaaatccttagaactaatcttagtataattcaacccaatatgtttagaagtgtaattagtaacactcttcccttttagctcacttagacactcactcccatataaagactctctgtggattcgatatcgaccttctcgggtaaaagctacacgacccgtgcctgcctacttatatagtagtgttggtggtacgtgaacagcatgcccgaacgattcattcccattaccacatacagatcaaatgattgatgccaccgcaggtcatgaattgttaagctttctagatgggtattctgggtataatcagattaaaatggatccttcagacgaggaaaaaacttcctttattacaaacagggggacttattgttataaagtcatgccttttggattaaaaaatgctggagccacttatcaaaggctagtgaccaagatgttccaagaacatctggggaagacgatggaagtttacatcgatgacatgttggtaaagtcaacacatgcgaaagaccatttccagcacctctctattacttttgaaattttacgtaggtataatatgaaatcgaatccagaaaatgcgcttttggcgtggaatcaggtaaatttttgggcaaatagaggaatcaggtaaatttttctcaaattaaagctttagaagaaatacctgatatacttatgaacaaaaaggcagttcaaagactaacgggaagaattgcagcctttggaagatttatttccagatctttcgagaaaagtttcaaattcttttcagttctcaagaagcaaaatcagttcgaatggactgaagaatgtcaataggctctcaaagatctgaaagcttatctatcaaaaaccccgttgctatcaaagccaaaggagggggagaggctatacatctaccttgtcgttgcagaaattgtcgtaagtgcagtattggtaagggaagataaaggtaaacaatctcctatttattatgtaagaaagacattactagatgttgaaactagatacccacatctagcaaaattagctttagctctaatcacgacatctagaaagttgagaccatattttcaatgccatccaattactgttgtgacttcatatccattaagaaatatactgcataaacaagaactatcaggaacattatctaagtgggccatagaattgagcgagcatgacataatatatcagcctatgactgcaattaagtctcaaattttagctgattttgtcactgattttaataatagcattgtctctgaagtggaaaaagagttacacatctttaacggtgctaatacgggtctatggaccctatttaccgatggttcttccaatgtaaaaggtgtcggcttaggcatagtcttaatatcacctacgggtgaaaggacacgacaaactatcaaatgtatcctataactaacaatgaagcatagtacgaagctgtcatcgtagggctggaactggcacgagaactctcaatcgagaaaatcataattaaaagtgactcccagctggtagtaaatcagatgcaggggacttacatcgctcgagagactcggatgcaacaatatctagaaaaggcacgggatctcgtaagacaattcaaaatgtggaaggtcatacaaatacctagagaggaaaatgcagaagcggacacattgtctaacctcgcagcagtcacagaagtaacgaataaagacaatgcaattgtcgtccatttatttcattcaataatcgacccggacaaaaatgaggtaactttcaacaatttaacctcggattggagaaacaaaattttaaattttttgcagaatgacaccgtacctgaagacaaaaaagcaggctaagcacttcgccgaaaagttgcacggtactgcctcattcgcaattctttatatcacaagatgttcggaggtcccttagaaaagtgcctcggacctaaccaaacggagttcgtgatgagggaagtcctcaaaggacactgtggaaatcacgcaggggcaagatccttggtcaaaacccttatcagagttgggtactattggcctaagatggaagaagaagctgagaacttcgtatccaaatgcgataaatgccaacggttcgctaataacatgcatcgactggaagaactattacacccaataatatcaccatggtcgttcatgaaatggggcatggatatagtgggaccccttcccacagctaaaggaaaggtacggttcttactcgtgctaaccgactattttacaaaatgggtagcggcggaagctttcaaacaggtgcgagaaaaagaagttaaaagcttattatggcggaatataatatgccgctttggaatacctaaggagatcatatgtaataatggcccacaattcataggctcacaaatcacagaattcttcaatagttggcaaatcctacgaattacttcaacgttgtatcatcccgtggataatggacaagatgaatcaacgaataaattcatcatcaacaacctaaagaaacggttagagaaagccaaggaaaattggcccgatgagttaccggcagtactatgggcttaccggacaacttcaaaaacagacatgggagaaactccattcgcgcttgtctatggatcagaagccttaataccggtagagattagggaaccaagcataaggtttacaacaaccacggaggatgcaaacgacgacaagttgaggattaatatggacttgttcgaacaaagaagagaagtcacattaatacgtatggcagctcaaaaacaaatcatagaacgttattacaaccgaaaagctcacctcagatacttcaaggttgggcacttcgtcctcaaaaaagtctttcaatcaacaaaagaagctggtgcgggaaaattaaatcctaacttggaaggaccctacaaagtccgaggcattgctgggaagggtgcctatgagctggaagctatggacgacaggatcttaccaacaagatggaatgccatccatttgaagaagtattacttctaaggaaaaggaatacccccgatcaggtatcgctacgttcgattttattcttgtgcagttaaaattttactaacccattttagatgataggcaaaaagctaacccatccccagatgatgatattagacctacaaagatgcgaggaagtaactgaattcccggtctagggttacactttctgatggacatttaaaagggttaagcagtcatatcatctaaaaactatataccttcgagtcccgtatgtttttccttttcaggaaaaggaccacatggaaggaatagtcaagtgctcgagatttcatttttcaaagctcaaacacttgggggacaatacagtatgaaaggcaaagacaaagcaaagaagactatcaaaaagtcaaagctcgagcatgaagatcaatctacccaacaagtcaagtgatacgagcaaaatcgaaagagccaaagactcaaaacacagatcctaattcgaaaaaccttcgaacttgttcatagatataaacaaatattcagatgaaaaggcaaaatattagttacatggaaggaatgcacatctttgtactcattcagaaaaactgttgtaactaaaaacagttgtggataaaagatcatcatctttgtactcattcagaaaactattgtaactaaaaacagttacgaaatctttgtactcaaatagaaaactgttatcaaataaaacagttacggatgaaagatcaaaatccttgtacttattcgataaactgttattaaataaaaccgttacggattaaaaagcatttccctcgtgattattgaaaaattttattaataaaaacagttacgggtgaaaacccctacctttataaaaacggttacaaacaaaaacagttattctcttgtattaactcgtaaaaatctattatataagaaaaacagttacgaaatacaagtgtgtatcaaacctgttaaaagaaaacagttgcaacatgagttttagatgataatcaaatatatgtaaaatgttgtgaaagttcaaacacaaaaactttcttcagaaaaattcttaaacatgtgaaaaattcctatctctctattgcattataacaccattatgaagttgagacgtcttcttcattaagtgtcgatcaaaaaagggccctctttcacaaaatcgtacctactacgaaaaggtgcggacaatttaaagcattttatctgcaaaactcagaggtaaaactaaaacctcgaaaataaagtgtgcaaaagacttaaagagtgaaacagaaactcaaaggaaaacaaaagtcatacttgcattaatatattaaaacggctaagtagaaactaagtattaacttatacttagccgtatagagtttatatacattaaggtgactctaagttgtcatttggggactttaagagatccaaatttacccccgatggaactgggggtaaccaccaattgagacaaagtaaaaaaaaagaggggaggaaccaacttcttaaacttcatcaagagggggggttgacttcactggcagagacagtaggagaagcttgggacgaggagacttgaacagcagaagcttcaccttcaggtgaggagagattctgaccttgttgagccttctccatagcctccttgatttttgcaatttcagcattaaggtcgaaatcctctcggctcatttcggtcaatgtgtcgaggcgagagttcatgtacgctcaactaacagcgacaactgtcctattttcaagatcttcgtaatccttctttcacagcataacctcagctcttagctcgtccctctcagctacatcagcatcattggaggcccttaaaggagcgagagacctttccaggaattgaattttctctaaggagttgcggagatcctcctaggtctgggtaagtgatcgcacaagctcgcatgaatactcctccttttggtctagcaaggccttaaatctcctgatctcttctgaggcacgagacaactgttcagcaaatgaggactcaaggatgttcttatctttgcctgcttgattagaagaagcattctccacagccaactccgccgtcatgactctcacctgctgctccaaggtacatttttcttcttctaaggcctccatgtcgagccttaggctttcatactgccccttccagttatctgcttcaacatgccactcttttacttcttgctctgagttagaaacccttttcataagctcggtgcctataaggttgatctacaaaaataaaaccaattagatacgataaatacatttacaagaatgaaatgcaagaaaatgcactctacctttaaagaagtatgcacgatctcattagcccatgtaagggaactgtggttatctagcttggctctctctgtcgggcctatcaatggttccagccacacatcaggatggccatactttttaaagagactaccatcagccagaacttttatcagcacctgcctcatcgccctgctggaagaccctacttctctaacagaaggcacgggagcaggcagagatgtaggagccacgagcaaggaagtctgaggagccgaaaaagccacgagagcaagagcagcaataggagcaggaatagccacaggagcagaagaaatgactggagcagttgaggggagttctctaaaagaagggggaaaacagccaagggagcctcatcaccaacaagaccaaagccttcacagaaaaaatgatcaacaaaatcacgccggagatggagtagcgtctttggaggcagaaagtccaacttcaggcatggaaggcacaaccacaatgtttaaccaaagaattaaattctttgaccaaagctatttttaggaatgaacacgggttactgataatcagaaaaataatactaaataaaagaagtaattaaatagacaataatatgatgcgcagaaaagtaaaatgtattgtattcgtagtttagatgcccttacaagtgatatcttattcctttatatagggaatttccttaatataacgtctatctcttggaatgatagcacattaatgagtaattattacattaatgtaacgttataaagaataaccgtaattgttacatgaaggtcgtgtaacgtgtaggtcaataattgaagatttttgaatcttcccatagctttgtctggattcattctggccatgtctcttccataactcaatcatgttgagtttctcgtggctaattacctcttaggtttattgagacgtgcctctttgttccgcgcctttttataggtccatgtccagcagtcatgttttccatggtccacgtaatcggctgagtcataaagaattatcatacgtgtaaaattcttttttaccaatacagatagttcccacacttaccatttaattatctattaatatttggtaagtggatacgcatttatggcgggaatattttgccgccgtttcacctcgaaacattgtatccttctctgaacataggcgtcacttgtcacttccatttaatgctcaagacacgtgttccctccggattagttctgcagttactcggcgccttttaggtctttttgcggctgcatcagtcacgaagtgataccttcaattatgactttttcatcattatcttttcccatgtttgacggttgtcttcaagtataaatacctcttttattttctttactttcacgaaatactttctaacttgtctcttttatttgtaaagaattttttccttgtctttgtaaacatgtcttcttcgaaccaacctaaaagagtgatcgacgtcgagaatttgaccccctcttctactccgactcggagtcggaggggtggtagactgaggagtttaagttctactccttcgagaggctcttcttcttcccagattatttcccctccttctgctaggtctttaatttctccaagatttagggcttccaggtctttgtctaggggtagagaacatcacgaacccttacgcgagccacgagttgatgaaatcattcccgctgagtttaccttcactagggatagcctggtccttgtaaatcagttgttatcccttgatagtgttgataggtatcccactattatcaccgaaggtctgattccccttgttcgcggggaatgttcttggcagcctgacttttctatctttattccgaatagcaacgaaagaattacgtattataagacgggatattcatttatacctacccttttactttagggtttaagcctcctattgatccagtcatcatcgaattctgtcgtttcttcaatattttcttaggacaggttggtcctcttgtgtggcgggttgtcgtgtgtctcagatgtttagattctttagtctcggttcctttcacctttaatcacctcattcatctttattctccgaccttatttcgtcaagggatatttactctggcttctaggagtaaaagagttttggtaacccctgatgacgataaggacagaggttggtaccttcggtacgttgctgctcccactgctagtttagtgggtgaagaaaatcttcccttccccgagaagtggaatcgtgcacgtgagtaaattttagctcacatttgttgtttttcttttgttttaaatgttttattaacaccgtagatgtttcttcttttttcagcaatcatgggtacttttgagaatgtctctggtatccgtgattgggtagaaaagttattgtcaattgctccgttagaacaaaggttttggaagtacttctccgggaagtacggttggaaagtgaagactcacggtaagtgaagcttttgttttctttctttgctcgaatctctttctctttttaaccctttattttttatagggttttctaaccgtggagtgtctgttgcgtctgttcccaaactgtccctggctcaagcctaggaaattattgctggttcttcttccttgaagaggaaagttgatgagtctaggaccttagaagaagaagaagatgatgagggcactttggtgcacaggtcacgaagaaggagggtgatttcaaacaatgagtctacacccgtggttgtgccttctgtgcctgaagtcagaccctctacatctaaaaatgcttctccctcccctgtacatgattctgtggatcacttctttcgtgaaggattttgccccgctattagtgaaattcccttggctgtctttcctgcttcttttagaggagttccttcatccgctcctactatttcctccgctcctttggttgttactactctcgttgatgcttttaccgtggctttccaagctcctcagacttccgtgcatgtagcttctttatctctgcctgcttttgtgccttccgttaaggaagtagggtcttccagcagggagatgtgacaggttctaatagaagttccggctgaggggagtctcttcaagaaaactggcgagcctgaagtgtggctcaaacccttgataggaccaagctttccataacgcccttacacaggctaatgaagtcgtgcatacctctttcaaaggtaaagtgcattctctctcatttcatttttgtacatgaaatttatcgtatctaattgatttctattttgtagatcaatcttataggcatggagctcatgaagagggtatcagatgtggagcaagaaattaaagagttgcgggctgaagcaggtaattggaagggacaatatgacagcttaaggatcgacatgtatgccttagaagaagagaagagtaccttggagcggcatatgagaatcatggcaatggagatagcagtggagaaggctacttccagtcaagctgacaaggaaaagagcatccttgagtcttcatttgctgagcagttgtcccgtgccttagaagaagctaggaatttgaaagccatgctggagcataaagaggagtattcaggcgagcttgtgtagtctctgacccagacccaggaggatcttcgcaatgccttggacaaaattaaatacccggagaggtccgttgcacctttaagggctgccaaagaatttgctgaggctgagaaggatgggctaagagctgagcttatgatatgggagagagattatgaagatcttgaagatacggcagtcgtcgatgttagttgggcgtacatgaattctctcctcaacacgttgatggaatgagttgggaggatttcgaccttgacgctgaaattgctaaaccaaagaagccatggaaaaggctcaacaaggttcgaatttttcctcacctgaaggtgagactcctgctgctcaagcctcttcgtcccaagctgctcctgctcctaccgccagtgaagaagttgatccccctcttcaagaagattaagatgttggttcacccctttttattttatttgattggtggttacccccagctccatcgggggtaaatttggatcttttaaagtccccaactgacaacttagaggcaccctaatgtacaaaaactatatgcggctaagtattagttaatacttagttcttacttagccgcctttttttaatatatgcaagtatgaattttttgcttcgagtttttgtttcactcttaagtcttttgcatgttttaattttcgagatttttgttaacctctgagtttttgcatagagatgctgaaatcactcgtaccttttcatagtaggcacgatgttgcatataaaatgcgagcctttttgtaggagtcattgtttatgaaagatggcccttttttatcgacacttaatgaagaaatgtctcaacttcataatggtgtaataatacaatagagtgataggaatttttcacatgtttaagaatgtttctgaggaaaggtttttgtttgaacttccacaacattttacatgtgtttgattatcatctaaaaatcatgttgcaactattttcttttaacagatttgatatacacttgtattttgtaactgtttttcgtacgcaacagttttttgagttaatacaagagagcaattgtttttcgtttgtagcagtttttatttaagttggggtttttacccataactgtttttgttgacaacagtttttaataagtacgagggaaattctcttacatccgtaactgttttatttgatagcagttctctgaacaagtacaagtatttttatctttcatccgtaactactttatttgatacagttttctatatgagtacaaagatttcgtaactgtttttagttacaactgtttttgaatgggtacgatgatgatgatcttttatccataactgttttttgttacaacagttttttttgtattttgaataagtaaaaataagtgcaaagatgcgcatttcttcctcgtaactaaaattttgccttttaacctgaacatgttcgaaggttttctggatcaggctttgtatttgagtctccggctcttttcgattttgctcgtatcacttgactagttgggtagatggatcttcaggctcgagctttgactttttgatagtcttctttgcttcgtcttagccttccatactgtatagtcccccaagtgtttgagctttgaagaattaaatcttgagcacttgactattccttccttgtggtccttttcctgaaaaggaaaaacatgcgggactcgaaggtatatagtttttagatgataactgcttaaccctttaaaacatccatcaaaaactgtaaccctagaccgggaattcagttacttcctcgcgtctttgcaggtctattatcatcatctgatgatgggttagctttatgcctatcatctaaaaaggttagtaaaattttagatgttcaaaataaaatcgaacgtgtgatacctgactggaggtacttcttttccttagaagtagtacttcttcaagtggatggcattccaacttgttggtaggattctaccgtccatagcttccaactcgtaggagcgtttgccagctatgcctcggactttgtagggtccttcccagtttggacttagcttacctgcgcctgcttcttttgttgattgaaagactttatttaggacgaagtccccaatcttgaagtatctgagatgatctttacggttgtaataacgctctatgattagtttttgagttgccatccgtattaatgctgcttctcttcgtggttcaagcaggtccaaattggtccttaattcgttctcgtttgcttcctccgtggctattttaaaccttatgcttggtttgccaatatccacaagtattaatgcttctgatccatagacgagtgcgaacggagtttctcctgtggctgtttttgaagtcgttcggtatgcccatagtaccgttggtaactcatcatgccaatttcctttggctttatctagccgcttctttagattgttgatgatgctttattcgttgactcagcttgaccattagccatggggtggtatggcgtggatgtgatcagtttgatttgccagctttcgaagaattctgtgatttgcgagcctttgaattgtggtccattatcacatatgatctcctttggtattctgaagcggcatattatgtttcgccataagaagtttttaacttctttttctcgcacctgtttgaaagcttcttcctctacccattttgtaaaatagtctgttagcatgagtaaaaatcgtacatgtcctttagctgtgggaagaggtcccactatgtccataccccatttcatgaagggccatggtgatattattgggtgcaataattccgctggtcgatgtatgttatttgcaaacctttggcatatgtcgcatttggacacgaagttctcggcttcttcttccatcttaggccaatagtatcctactcagattagggtttttaccaaggatctcgcccctgagtgatttccacagtgtccttcgtggacctctttcatgacgaactccgtttggttaggtccgaggcattttttctagaggccctccgaacatcttgcaatataatgagttgcgaatgaggcagtaccgtgcatcttagcggcaaagtgcctgagctatttttttgtcttaaggtacggtgccattctacaaaaaaaattaagatttcgtttctccaatcccaggttaaattgttgaaagttatctcatttctgtcctggtagatcgctgagtggaacagatgaacaacaattgcattgtctttgtttgttacttctgtgactgctgcaaggttagctgatgcatctgcttctgcatttccctctctagatatttgtattaccttccacattttgaattgtctcacgagttctcgtgccttttacaaatattattgcatccaagtctctcgagcgatgtaagtcccctgcatctgattaactactagttaggagtcgttgttgattacgatttgctcgattgaaagttctcgtgcgagttctagtcctacaatgacaacttcatactctgcttcattgttagttataggataacatttaatagcatgtcgtgtcttttcacccgtgggtaatattaagactattcctaagtcgacgccttttatattggaagaatcatcgataaatagggtctatagacccggattagcaccgttaaagagtagtaactctttttcaactttagggacaatgttattactaaagtcagcgacaaaatcaactaaaatttgagactttattgcggtcctaggctgatatattatgtcatgctcgcttaactctatggcccatttagccaatcttcccgatagttcttgtttatgcaaaatatttcttaaaggatatgaagtcacaacagtgattggatgacattgaaaatatggtcgtaattttctagatgccattattaaagctaaggataacttttctagatgtggatatctggtttcagcatctagtaaagttttgcttacataataaataggatattgtttacctttatcttctcttatcaatactgcacttacaaaaatttctgagacagccaggtagacgtacatcctctccccctgatttggctttgatagcagtgggggttttgatagataagctttcagattcttgagagcctgttgacattcttcagtccattcgaactgattctgctttttgaggactgaaaagaatttaaaacttttcttggaagacctggaaataaaatcttcccaaagccgcgattcttcttagtctttgaacttcttttttatttgttagtatataaggtatttattctatagctttaatttgagcggtatttacctctattctcctatttgatacaaggaaacccaaatatttacctgattgtacgccaaaagcgcatttttctggattcagcttcatattatacctgtgtaaaatgtcaaaagtaatagaaaggtgctggaaatagtcttccgcccgtgtttaccagcatgtcatcgatgtaaacttccatcgtttttcccagatgttcctggaacatcttggtcattagcctttgataggtggatccagcattctttaagccaagcatagcaatctgcgttagcctttaaataatcaattaacttacctcttcgactggggctcagcctcgtgcctatatgcactttctgtttaggtttttgttcaaacaacggaacaacttcgagctcttccgtagttgtcttgatgtgttcttcttcctccggctcttggatgacgtccggtctggaatccacgctcgtgtgagccaatgcatctttcgtggtgacttgatttaccttctcgtgagtttcttcttccgtatctgtttgagcactcacctctttcgtacctgttgggtcagtaactttttccgtacctgtttgaccggtaacatctttctggatgatttctctatttttcgattctttcgtctcaatttttttttgttacaatgcaccacagaatttatgtttctaaaggtttgctgatcgcctctaatctgtctaattccccattctgatgggaattttattacctgatgcaaggtagatggtactgctttcatgtcgtggatccatggccttcccataatcacgttataatccatgtcaatatcattgacttgaaatttggtatttttagttactcctttggaataagtgctaagttcgatctctcatttggttatcactgtagagttgtcaaaccctgatatggctcgtgcctttgggatcacctgaattcccatgagcatttcttccacgactcttagcaagatgatattgactgaactacctggatcaatcaacactcttttaacgttagtgtcatgaatgaggaaggatattaccagagcgtcgttgtgggggaacatcagtccgccgaaatctgcatcatcaaaggttatatcatctgcgtctagattttctcgaacccattttccgtgtctaattgtgattttcgaggctactttgcaaactattccgtttacttcttctcctccatgtatcacgttgacgattctttttggagatagaggattcaggggctcctgcctgttcttcatatatgcctatttacctttatcactaaacaattctgttaaatagccttgtttcaataattgtattatttcaccttgtaaaaatctgcaatctgcagtcctgtatccatgatcattatggaactcgcaccagaaatacgggttccttttatttgagtttgaccgcatttctttgggccacctaaccttatctcccatatttctcaatatttcaacaagttcaggggtacttacattaaaggtgtgatctccaattcgtgcattacctctaggtcgttcatctcgatcctttctagatctagatgaggatgagcccgcatctctgcttggtggtctataatctgacctagtgttttcgaacctaggacgagtttcgcttcccgatggtcctaagtaaggatcgtacctatttttacctgatctcctatctgattcgtaacatctggattatcacgacccaaactggaggatcatgactagcacccgggacatacttgcctagcaccaacgtacattttatctaaccttcttattatatttaaaggataacgagatcaatataaatggtagatatatatcatgaacatacatcacataggatgacaagattgcttagaaactacataagaggtacgagctacaacgctatcatgaaagactatacaacaaaaacttagccaacaaggcataccaaactatacatgagtcgacacctgtctatgagcctctaaaggagcataagtaatgcaacatagccgaaacagggccttgacatacccatagtatctataacaaaattgcataccaagaccacggcaagtccggagaagggatctcgcctataaccgctgaactggaaagcctgttgtggtgggggagatgtgtctacctgtctatcaggacctgaagcacgacatgcagcgttcacaaataaaaggacgtcaatacgaataaagtactgagtatgtaaggcaagaaagcataaataagaacagtaatgtaaagagagatgtaggagatacaacctgtagatctgagttcttctaagagacattaacatgaaatgcatgatacatatatacacataatctttttaaacatccacctctgtgggcatcatcatcatcatagaacattcgcctctgtgggcatcatcatcatcatatcatacccggcctcaaagaggactcggtaaacctaactgatcagtggttgcacaataggtgccatactcggccgactatagcgcgactcggtagagtaaaacagatatatatatatatatatataatgcatgcaggactcattggaatcatgttctaaacatttcggagtgacgtaatctctgcacacatcattagggctaactcttcatcgagaatcttataagaatcaggaagtaccaacaacattgataacataagaataagataagaaacctcaacatcaattgttccaactccttaatctacaataagagcaacgacactattgttatcgtttaagcgtcataactattatgtatctaccacaacctattttacgatgaaatggacaacacctcccctatttatatgacttcacacaagtcaaaaaaatcaccaaacagaccaaacaacatcaataataatcatattgagcctcccaaaacagtccacacacaacctaatcacttcacacataagacgaccgccgtagtcgtgtcaaacgacccggaaatgttacaacgaatgaccagctcacaaccctacatatatattgtgtttctacacacccttcctccacaaagcagtagtaaaacacgcagcccaacaacaacacaaaatagtccgctacaagtcaaataactcgaactcacggcttccgatcaccgtcccgtgagttctaactattaggaaacatatttatcaaccttccttgatatttaaacacttaaatacagatattatacttttcttaactattaagtaccttccaaaactctaactacaaagaaagaggagagacggtataatgacacttacgtcgtagggatcgttttgatgttattgcttctcaatttcatgccggggatgatattcttctttgaaaacctagaagatagcttgaggttatgtttatgggtgttatacattcgttttatgcttaataatgaagagaaagctgacctaaggtttatatatatcaagtttggaaaagtcaaagaggtgctagcttggcaccctaggattggtccatcttccgacgcttatatctttttatcctgatgccgtatgaatgaacggttaagagatttggaaactacattccaagaccttcaatttggtatattatatgtcccaataagacctcatatagaacattaaaggtatttctcaaaaagctctagtgatccacctacttgtcacttacgatgtctgcgcagtcctgcgaaattacaaatatctctctactcctatgtcgtatcgatgaacggtttaatgaattggaagctagacttatagatattaaatttggttggtagataatccaataattccaagtatatttggagaaaatctcagttacatttgacctaagtttcaacacattatgagtataacttgtgaagacctttgccgacttttgttccacaacttgcttgacttcaaaatgtagaacacaactatcataaaataaaaattaactcatatcataaactccttattatgtaatgaaccatattttcaccctaaagtacatgttataacattccaaactcgtcgcctttcggcgaaacttattttcttcaattagtttagcttctaagctttccaaccctcttggtactcattattcatgatcttaaatatttgtaaactcaaatgtaacatgattaacttactttatattacatcaaatataatcttatttctgagcttacataaattgacttacgatgtactctcacgtacgaaaatatggggtgtaacatggatttggtatgatcttcatctttcgaacgagcaatggtatattcttctattcgaagtttagtattgtacctgttgtaaacatcattccacgttgtagcggggaattctctcaagctttctttgagtctcctcgtggcttctaagcttttgtcatttaggttacttgcaaatgccgtggctgcccaattatcaggcacccttggtagttgcattctttctcgctggaacctgtctacaaattcacggagtagttccttgtctcctttctttattttaaatatgtcctccattctttctcgactttttgtgcaccagagtgtgcttttatgaaagaatttgcaagctcagcaaaagaatcaatagaattttcagggagaagagaataccaggttagggctcctttggtaagtgtttctccgaaatttttgacaaggactgattcaatctcttattttgttaagtcgttgccttttactccgatggtaaaagcagttacatagtcgcgtgggtcagttgttccatcatacttaggaacgtcaggcattttaaacttcttgggtataggaaagggtgttgcgcttggtttccaaggttgttgagaatatctatcaacatcaatgcctttgataacaggtggtactccagaaattttcttgattcgatcattttgttccttcacatgtttctgcaaggttagtagtaaattttataattcagagttattagtcatacctggtctcgtttcgagagattcgttaggagggtcatctcttgctgagtttaccaacccatactgaggatttttcacggtgatagtattattgggaggtggtgtaagtgatgcaggtgatgccgctggtaatccccttgcaaattcttgtaaagcttggcccacatactctgcaatcattttctttacccgatcttgttctaccgtttgatcatcattattgttgttgttattggatctttctggggattgttcccttgaaccacgtggggttcctgaagatgatggaactggagttccattcctctgttggttgttatcgttggggtttgacataggttagaggatatcgattgaaaagcaaacaaagattatcagattcccggtaacggaaccaatttatttaaccaaagaattagattctttgagcaaagatatttttaggaatgaacaagggttactgataaacaggaaaataatactaaataaaataagtaagtaaatagacaataatatgatgcgcagaaaagtaaaatgtattgtattcgtagttcagatgcccttacaagtgatatcttattcccttatatagggaatttccttaatataacgtctatctcttggaatgatggcacattaatgagtaattattacattaatgtaacgttacaaagaataaccgtaactgttacgtgaaggtcgtgtaacgtgtaggttaattgaagatttctgaatcttcccgtagctttgtctggattcattctggtcgtgtctcttccttaactcaatcaggttgagtttctcgtggctgattacctcttaggtttattgagctgtgcctctttgctctgtgcctctttataggtccatgtccagcagtcatgttttccttggtccacgta

SEQ ID NO: 2 - DNA, 1000000 bp, synthetic construct
  misc_feature 1..1000000: note = The sequence is synthesized.
  source 1..1000000: mol_type = other DNA
ttctcttcattattcatcataaaacgaccatataacacccataaacataagctcaagctatatactagggtttcaaagaagaatatcatcctgggcatgaaatcgagaagcaataacatcaaaacgatccctatgacgtaagtgtcattataccgcctcttctttttctttgtagttagagttttggaagttacttcatagttaagaaacgtctaatatctttatttaagggttcaaatatcaaggaagtttgataaatgtatttcctaatagttagaattcacgggacagtgatcggaagccgtgagtttgagttatttgacttgtagcggactgttttgcattgttgttgggctgcgtgttttactactattttgtggagttttggaggaggaagggtgtggataaaaaccatatagatgtagggttgtgagcttgtcgttcgttgtaacatttccgggtcgcttgacacgactatggtggtcgtcttatgtgtgaagtgattaggttgtgtgtggactattttgggaggctcaatatgattattattgatgttgtttgtgctgttatgagattttttttacatttgtgaagtcatataaattggggaggtgctgtccgtttcatcgtaaaataggttgtggtcgatacataatagttatgacgcttaaacgataacgatagtgtcgtttctcttattgtagattaaggagttatgacatttgcgtagcttgaggttggggtagtatatacaaggtatgtgagtctatccctttccttcttttgcacgacaccgattgtacgtaatgcaatgaacgagcttccaaagatactctactcttaaaagctagcagtacttacattgtttcccttcttatggaacaattgattttgaggttgattctcttattcttttgttatcaatgttgttggtacttcctaattattataagattcttgatgaagagttaatcctaataacatgtacggagaatattgaccttacgccactccgaaaggttcagaatatgaaaattttcgaccccgggcccacgcgttcggattttgaaaattttcgaagcaatgaattacccgaagcctaaggatcataattacctaatatatttaggaattcatggctaaaaagggataattcactaattatcaaagccctaggaatttctacccatttcttcccatgattttgataaattaatagaggatttaactagaaattgatgtttaaactcggtgttaataagaaatttacttacctcaagtactaggttgaatcgtcctcttggaagctctcaattaactcaaggaagaagatggaaatggaggaaaatgaactaaacccgctataaaaatacactgccaaggatttaccctatttgaacgcaccctgggcatgcgttcacgatgctttaaattggtcaggtccacagggctgcgaacgcgagggaggggtcgcaaacgcgaagacaaacggcagctgggatggcccaattggctggaccctatgcgaacgcgacgaagggcccgcgaacgcggaggctagctgggctagaccttcgtgaacgcggctggaggggtgcgaacgcgaaggccagggggaccaacccatcgcgaacgcgggatggggaacgcaaacgcgtagagcatccgtagcctcttcccaattcattcttcacgaacgcggccaccctcccgcgaacacgaagaaggaaaccagatacagaaaattttggtgttggattcagctcccggggggtcaataactcacccgaccccccctcgggaccctgtccaaaggcaccagcaagtctgtattcatgatacggactcgcttgaacttccggaacttgaaaaacaacaacagaactcaaaattcaaccccaaaacaaaattaatcaaacttaagaactttaaaattctagaattcattacattgcgccgaacgggtctatactactcggaattaccccaaattttgcagacaggtcataaatgactatagctattgccagcctcggaattccattcgaactttgatagaatgaagtcccgttccaggctaaattctaaacttaaggaaatcctgatttccatttcgggcgttgaaacgctcccgggtcatcagaaacccaagccgaacatacgcctaagtctgaaatcacagtacggagctattggagctattagaactcgattccgaggtcgtttgctcaaaatattgaccgaagtcaaacttggccaaataggccagacttaaggaaccaagtgttcctaaaccatccaattcattcccaattcccaaaccacccgctcccgcgagtcataaagcacgaatagctgctatggaaggtttcatttaaggaaacgggaccctaatacgcaaaacggccggttgggtcgttatattctccccctcttaaacaaacattcgtcctcgaacgagtctagaatcgtacctgaagtgcagaatagctgtggatatctgccccgcatgtcctgctcggactcccaagtctcctcctcaactggttggcccctccactggaccttaactgcagcaactgtcttagacctcaacttgcggtcctgcctatcaacaatagccactggctcctcctcgtagcccaacttctcatctaactgaatagtgttgtaatcaaccacgtgcgagaagtcggcatgatacctccgaagcatggaaacatgaaaaactaggtgaactcctgataaagctagaggcaaggcaagctcataagcaacctctccaatgcgcttcaacacctcgaaaggacctataaacctggggctcaacttgtcgttcttcccgaatctcataatgcccttcatcggtgaaactttcaacataaccttatctccctccatgaatgatacatcacgtgcccgttgactgcgtagctcttctgcctagactgtgctgtacggagcctctcctgaataatcttcaccttttccaaggcatctctgaccagatctataccgtataacttggcctcaccaggctcaaaccacccaatcggagaacggcatcaccgaccatataaagcctcaactggagccatctcgatgctggactgataacaattattgtatgcaaactccgccaaaggtaggaactggtcccactgacccccaaaatcaatcacgcaagccctgagcatatcctccagaatctgaactgtacgctctgactggccatcagtctgagggtgaaaagctgaactgaggtctatctgagtacccatctcgctgtgagctctccagaagtgcgaagtgaacggaggaccccgatctgagatgatagacatcggcacaccatgcaaccggactatctcacgaagataaatctgagccaaccgctctgtagtgtaagtagtagccacaggaatgaaatgcggcgatttggtcagtctgtccacaatgacccaaaccgcgtcaaccttccacaaagtccgaggcaacccaaccacgaagtccatagtgatatgctcccacttccactgaggaatgggcatctgttgaaaaaagcctcatggccgttgatgctcgtacttaaccggctgacaattaagacacctagccatatgctgaacaattgtccttcttcatccgcctccaccagttgtgctgcctcaaatcacgatacatcttcgtcgctcctgggtgaatagagtaccgagaactgtgcgcctctactagaatcctctccctcaggccgtcaacatcaggaacacacaatcgaccctggagtcgcagaacaccatcctcgcctaaggtaatctctttggcccttccctggaccaccgtatccctaagctctgctaggcgtggatcatcaaactgccgagccttgatctctaccaataatgaagattgcgcaaccacatgagccaaaactcgacgaagctcggaaaggtccaatctcacaaatcgattggacaagtactggatgtccaaggctaaaggcctctcctcagctgaaatgtaggccaaacgacccatgctagctgcctgcctgctcaatgcatctgccactacatttgccttgcccggatgatacaaaatagtgagatcatagtccttcaacaactcaagccacctccgctgcctcaaattaaggtccctctgcttaagcaagtactgcaggctgcggtggtcggtatagacctcacaagatacaccgtacaaataatgctgccatatcttcaaagtatgaacaatcgccgccaactccaaatcatgcacatggtaattcttttcatgaacctttagttgtcgcaaagcataagcaataaccctgccatcctgcatcaacacacatcccaacccaacgcgtgaagcgtcgcaatacactgtatatactccaaactcagaaggcaatgataacactagtgctgaagtcaatgctaacttgagcttttgaaagctcacctcacaatcatcggaccactgaaatggagaattcttctgagtcaatctattcaatggagcagccatagaagagaatccctcaacgaaccgacggtaataatctgctaaacccacaaaactcctgatctctgaagctgaagtaggaagtggacaactatgaactgcctcaatcttctgcgaatcaaccttgataccctcaccggacaccacatgccccaagaacgccacagactccaaccagaactaacacttggagaacttagcatatagattctattctcgcaaggtctgaagcacaaccctcaaatgttgctcgtgctcacccaggctccgtgagtagatcaatatatcatcaatgaaaacaataacgaaggagtcgatatacgacctgaataccctattcatcaagtccataaatgttgctggggcattagtcaagccaaaggacatcactaagaactcatagtggccatatcgtgtgcgaaatgcagtcttcgggacatcagaagcccgaatcttgaactggtgataacctgacctcagatcaatcttagagaacacacgagcgccttgtagctgatcaaacaaatcatcaatgcgcggtagaggatacttgttcttgatggtcactttattcaactggtggtagtcaatacacatccgcatagacccgtctttcttcttcacaaataggactggagcaccccacggcgacacacttggcctaataaatcccttggccaacaactcctcaagctgctccttcagttactttaactccttaggaggaatggaaataggttgagtatctggagccaaatcaatatagaaatctatatctcgatctggaggcatgcctggaagatttgaaggaaacacatctggaaactctcgaacgacaggcactgaatcaatggtaggagactcggcggtggtgtcccacacataagcaagataacacagacaccctttctcgaccatatcccgagctttcatgaaggaaatcacccggctgaaggcactgactgaagaacccctccaatcaaacctcagcgactcaagcatggctaatgtaactatcttggcatggcaatccaagacagcatgatgaggagatacctaaaataacctcgaaatcaaccatatcaagcaacaataggtaggctctggtctcaaccccatagaaagtaatcacgcaagcctggtagatccggtctacctctatagagtcaccccttcaacactgaaaagctagtaattttatgtgtcttcttgagcgagtgaagtgcttcacggatgtggagcacgaacgcataaaactttttgcttttcctttccctccctcgcttacagttacttccaattccaaccaatttatagttaatgcacccataagaacccgacaatcccccgtatggagccagcgagggagaacccaaagactcacaaataacatctagagaatgggaaaataaggctgaaacatatgaataagtagaccctggatcaaatagtactgaagcctctctaccacagaccgagataatacctataatcacagcgtctaatgccattgcgtctaccctggctagaatagcataaaatctagctggagcacccgatgtctaatcttccccaggacgagctggaactgaacgacccactcctgattggcctccccctctaggacggcccctgccaacctgacctacacccctaggtggtcgtgctgctggtgttgtaatcataggttgctggctctgctgcacggccttgccccgatacttgggacaaaacctccacgtgtgtcttagatccccatactcgaagcaaccccctggaactactgctcacttccctgaagaggaggaaccttgaatagctgaatagcggtatgaatcctctggtaaagcactgagataagaactggaggatctctgatggctagaataactgttaggtgcactctggatggctggaggatgataggagcgctctagcattgcgctaaactggggcttgactggaacaaccctaggaggtacgggaggtgctgaataggaaggcctgctgaactggacacctccgtactaaccctggcccttgctggagaccctctgaagtcgcctgcaaacctggccctcttgtcctgctgaccctactgacctggctgaccctgctccctgcccctcacacggtaaccctcgatacatcgagctatatcgactacaagttgatatggggtacccatctctacctctctggccatggaagtcctgatactcggatgtaagactgccacaaaccgtcgaaccctctcagcatctgtgggcaatatcatgagagcatggcgagacaaatctgagaacctggcctcataatctgacacagacatctgcccctgctctaacatctcaaactgaccccgcagttcctccctctcagacagtggaatgtatcggtccaagaataactgagtaaactgctcccaagtaaccggtggagaccctgctggcctactgagtatataagactgctaccagcggcgagctctgccctcaagctggaaggtcgtgaaatctaccccatgtgactctaatatcctcgtgttgtgcaatctgtccctgcacctctcgatgaaatcctgtgcatcctttccccgctgacccccgaaggtcggagggcggagcggggtccatctacccaacagcttttgttggtctatccctgcaactggcctgggctctggtgctgccactccaggctgaaccgcgatctctggtggaatatctggagtacgatgtactactgctgctggttctatagcctgagcggtaggggtctgaactccccctccttcctgagaagtagcaggatctgatggaagtacacccgcctgtgacatagtatccatgaacctcagtatacggcccatgacctcctggaagcccggcgccgtcataaaatcagctggtggtggaactactggaggaagctcatcctgctcctcaacataaggatcctcaatcggtgcaaccggtaaaactctgggatgccctcgccccctactacgaacaggatccctacccttgcccctaccacagccttgagcggcgggggtagcagcctctcctggatccggaacatgtgaagcacacgtcctcaccatctgtgagagagtagaagaacaggtttgagtacatcatcggttgcacgataggatatgaacaaaaagagtttcttaacgccctatagcctcctgaagataagtatggacgtctccgtaccgatccgcaagactctactgggttttcccgtgactcgtgagactacgtgaacctaaagctctgataccacgttatcacgacccaaatcctaattcaggtcgcgatggcgcccaacagcggggttaggcaagcctatataactttcactaagtgatacccttcccatttgttcaaacaagtcaatggttaccagtttataacaactaacatgatactagccttgagtgaaagtaaaatcatagaagatacaaggccgaaataaaacatacacatagacatacatcccaaaaccccaaaaatatataccgcgtgtgtgccaggaactagtgtcaccagtgccacgggcaactactaaatatacaatgactacaacatatatatacagggtctcagtctgaatgaaatagacagagagcataacaaaagaaactccagggtgctgctaggaagtcgctagaaaggcaactcaccgtgaagtatgaccacgctatcaatatctggcaccggcctgaaaatcaaatggaccagcctccgaacctatacagtcaagtacagaaaaggaaagaaagtgcagcatgagtaaatatatataaatatgtacccagtgagtatcccgtctaatctcgaagaagtagtgacgggaggtcgactcgatactcactaaggtccaaaagtcgtaaagtaagcaggttgtaaagaaaactgtaggcaagtaaaacaaataatcaagtacatcaatatccgacatcaaataacaatctcaaatcgaacaagtttggtatccgtcgtggcgtatggcccgttcccatatggtactcaacctcgctgtagcgtatggcccgatcccaccctggtagtctcaatctcgttgtggcatacggacctatctcaccctggtagtctcaatctctccggggcgtacaacccaatcccataatataatcaatcagaactatgtcgtggcatatgacccgatcccacaatataatcaatcatcactctgccgtggcgtacggcccgataccatcccgtgattctcttatcacacttaaatcaagctaggtatcacaatgttcaaagacaacaatacaatgaacatgatgtgtcctaactactcggacgaagcagcaatagcccctatgtacagactctcatcactcggtgcgtacgtagcccccaaataagatcacatagaaaacaaggttacctagagggacaatttcactcttacgaggttagaaaggagactcacctcgacgaagcactccttggaccaaagaccggatcaagaatgcgcccaaagctccgaaactaccctcgacggctcacaactagccaaacatagcatgattgaatcaatttatgctccaaaaataagaattaacaagaaattccaaaatacagtattcttgaaggtttttgaaatttcgacccctggcccacgcattcggattttgaaaattctcgaaggaataaattacccgaagcctaaggatcgtaattacctaatttatataggaattcatggctaaaaagggataattcactaattatcaaagccctaggaatttctacccaatttttcccatgattttgataaattaatagaggatttaactagaaattgatgtttaaacttggtgttaataagaaatttacttacctcaagtactaggttgaatggtcctcttggaagctctcaattaactcaaggaagaagatggaaatggaggaaaatgaactaaacccgctataaaaatacactgcccatggatttaccctatgcgaacgcaccctaggcatgtgttcgcgatgctttaaattggtcaggtccactaggccttctacgcgaacgcgagggaggggtcgcgaacatgaagacaaacggaagctgggccggcccaattggttggaccctatgtaaacacgacggagggcccgcgaacgcggaggctagctgggctagaccttcgcgaacgcagctggaggggtgtgaacgcgtaggccagggggcccaacccatcgcgaacgcgggatggggaacgcgaatgcgtatagaatccgtagcccctgccaaattccctcttcgcaaatgcggccaccctcccgcgaacgcgaagaaggaaaccagatacagaaaattcttgtgttggatttagctcccggggggtccaaaactcacctggcccccccccctcgggaccccgtccaaaggcaccagcaagtctgtattcatgatacggactcgctcgaacttccggaacgtgaaaaataacaacggaactcaaaattcaaccccaaaaccaaattaatcaaacttaaaaactttgaaattctagaattcattacattgcgccgaacgggtctatactactcggaatgaccccaaattttgcagacaggtcataaatgactatatggagctatttccggcctcggaatttcattcggacttcgatagcataaagtcccgttccaggccaaattctaaacttaagaaaatcctgatttccatttcgggcgctgaaacgctcccgggtaatcagaaacccgagccgaacatatgttcaagtccgaaatcattgtacggagctactggagctgtcaaaacttgatttcgaggtcgtttgctcaaaatgtttaccgaagtcaaacttggccaaataggccagccttaaggaaccaagtgttcctaaaccatccaattcattcccaaatcccgaaccacctactcccgcgagtcataaagcacgaatagcctctatggaaggtttcatttatggaaacgggaccctaatacgcaaaatgattggttgggtcgttacacagatgaccaataccgttgacctttccccacgccttgggcttgatcccttaccactcctaccccggcacttcgtcccagaattttcatgccccaacaaccaaaacaacttcatacctgcttcaacatctgctcctacttttggaccccctccacaagctaccctccaccaatcctctagtgagcccgcatttccagctccagatacccaatattatgccccgaaacccaccttcaaagtcccagatccttactcctacactcctcactttgagcctcatgctgaaactgagaaaccacccaagaatgcagagcaagaggagatatttaggaaagtaaagagtttggagaaattattgagaaatatgcaagggttaggaagccaggtgagtgtggcttataaggatttgtgtttgttccctgatgtccagctgcctgccgggttcaagatgcccaagtttgacttgtatgacggacatggggatcttgtaactcatctgagaggttattgcggtaaaatgagaggcgctggggggaaagatgaattactgatggcgtactttagccagagtttgagtaaggcagctttagaatggtacacctgttaggacgccagcaggtggtacacatggaacgatatggctcaggcctttgcccgacactttcagtacaatgtagacattgtgccagattgcctatctctgaacaaggtagaaaagaggcctaataaaagctttagggaatacaggctcagatggagagagcaagttgcccgagtcaatccaccgatggaagaagctgagatggttgagtactttcttcaatcccaagagcctacttactttgggcatttgatctcggctgtggataagccttttaatgatgtggtaaaaatgggagaaatggtagaaattcggctcaaatcgagcaagatcatgagttactctgctataaaagtgaccacacaggcaatccagaatggtacaggaagcttgccgggtcagaaggagcatgatgatgttgccatagttgtctcaggatcttgaccccgaccccaaccccaaacatatccctgggctccacataatccacctaagtattatcttcttaacaacatccggtcatatgtccaaccactaggtcactccttatggcgagcgccaacaccgcataatacactcttgccttcacaatgttttcgagcatccaacaaccctagaaaataggggtatggaggggaacaaaggttgaaagataattttacaccaatatgagagtcatatgcaagcttgtttgagaaattaaagcattatgacatgattgcacctattccccaaaatcatgtggacccacatgcaagaagctttgatccttctaaaaggtgtgaataccattccaatgcccaggggcacgatgttgaaagatgtcgtgctttgaagagggaaatagaaagaatgattcaagaagggataattgtagtccaaggcagtaataccctaagtgtcacacataatcctctacaggtacatgacaacgtacaaatttctgggacggtttgcaatgaccaaaggttggtcaaaggagtcaatgagacgcttggtgaaaataatgtgattgaagttagtgaaggacccaacaattttgatgtgcaactcagtggctaaaatgtcgagcttggtaattggaaagacactcatttcttggctatccagggaggagttttggtggtttattttgttgtcatttctgttgtccgcgttatttcagggttgtagtatagatatggtcgtgtggctcaaaccttcttcttcttatttcgcctagtttgttttattgtagtaactcgtgtagtattatctaggattgttcctgggttgtaacccatgtctattttgcttgttttgttaaaacccttttcaccatctatctaatttaatcttttgttttccggtagttctagtcagctttttcttttaggttatttttccctttatagctcttttcatgctaactctaatgacataacatgcacgcataattcttagcctggtcttgaaagttagtttaatcatgaagcaatgacacgatttcgaatatgataaaatgatgcatttgaggaaacaagtaaaaatccacgcattttgagataacctgaagcttgaattgagtgaaactgaggcagttagtctgagaaatataaaggttgatgagagcatacaacaaggaaatgtctctcaagcagtttgaggtaaatcaattagtgttgaaacgtattcttccacatcaagataaggttgagtcaagtctgcttcaaactggcgagggtcattcatttggataaaggtattgcccattggcactttgtgtttgtgttgataccgtcaagaaacattgtgaatggttcttctgcttattttcgattgcatgtttgtacttggcatttttaaagtttggtatgacgaaggcattttattctgctacccaaacacttttatcttttgctaccctttttgagccttaatttgttttgtttcatacccctcttttggaatcagaagtagaactaggaatgagaaaagaaaagaaaagagaaaaagaatagaaaaagaaggaaaagaaaggaaaagaaaggaaaagaaaaaagagaaaagaagagaaagaaagagaaaaagaaaaagaaaggagagaaaaataagccaacttcaggtttgaactacgttcgacctaatttcttctatggatacgtaggcagcctcactctgaggttcggtcccatcaaaataaaaatccaaaaaaataataaaataaaattccccagactccatgaaactggggcagaagttttaattttggccaaaagatctgattccaaaagttgtaattttgaaccctttaatcttaaattattttgagcattcatgcctccatttctttccaaccctatccaaaagcatgcattacggtccaaagaaatactttccgaccaatctttgaggatgccaaatcaagggtgtggtgaaagcatgatgttcatgcatcatgggtaataccttgttctcaacacaaagagaaaaaatgataataagagagtcttatcggtgaaaacccgcatgggcaccgtaaggcgacggtgagttgagaaaaaaaaagcaaaatgagagaggcttgatggtgaaaacccttcagggcactacaagtcgactgaggattgtggataaaataggacaattggagcactgaagcccagtctacaacatagaggtataacaagagttgaacaagaattgcttgacagattaggctgctcaatccaaaaatgcatgtcatagtcattagagctggtgtccacatgtgataagtttctactttgtaattttcttgtttgatatcatctctttccattttcccttactttgttccttttgctgtgttcaattcctctttatgagtctatttggtcagaacaagtgagaaatgactttaaaatttgctaccagctttccaattgcacagagcagcatctggctagcacatcaaggcataattcaggaaaggacaatatgcgcattgatttgatgataatcgatgtgctttaggatttatgtgaagtgcaaaagttcggtaaatgtcaattcatgagaaatacatcgggtataaggtattgggcttgaacaaatcagaggtgttttcattgataaggtttgacagagaaagtggttaaccaataacaagcaaggtcttccaagtggaaatcaaagttatcatggaaagtgaaggagcaaaagccctcaaggtcaaggccacaaactaaccaccatgtttaaactcacaagcttttctttgtctgaaacagggatgaaggctatgttcaaatcaaagcttgaatttttcatgtgtaatgccccaattctgctcatacaaaggttgttgagaacatcacacatcacccctaggagatgcacttcctagtccgggtctttcaaatatatttttgttcaggagatgcacttcctaattcgagattttacccctaggagacgcacttcctagactgggtatttcaagttatgttttgttttaggagacacacttcctaaattgaagttttacccctaggagacgcacttcctggttttgggtcagttaagttcatccctaggagatgcacttcctagttcgagtcattaaagtttcatccctaggagacgtatttcctagtctgggtcattcaagttatattttgtttaggagacgcacttcctaaattgagattttacccctaggagacgcacttcctagttttgggtcattaaagttcattcctaggagacacacttcctagtttgagtcattgaagtttcaccccctaggagacgcacttcctagtctgaatctttcaagttatattttgtttaggagacgcacttcatggtttgggtcatttaagttcattcctaggagacgtacttcctagtttgagtcatttaagttcgttcctaggagacacttcctagtttttggtcatataagtttcatccctaggagacgcacttcctagtttgagtcgtttgagttcacccctaggagacacacttcctagtttggggttttcaggatatactttagaagaggcacttcctaaattgagatttcatccctaggagacgcacttcctagtttggttaatttaagttcattcctaggagacgcaattcttagtgtgagtcatttaagtttcccccctaggagacgcacttcctagtctgggtcattcatgttatgtttttgttctaggaaacgcacttcctagtttgggtcattgaagtttcacccctaggagacgcacttcctagtatgggtcttttaggttttgttttaggagacgcacttcctaaatttaaatttcacccctaggagatgcatttcctagttttgggtcatttaagttcattcgtaggaaacacacttcctagttcgagtcattgaagtttcaccccctaggagacgcacttcctagtctgaatctttcaagttatattttgtttaggagacgcacttcataaattgatattttacccctaggagacgcacttcctagttttgggtcatttaagttcattcctagtagacgcacttcctagttcgagttattgaagtttcacccctaggagacgcacttcctagtctgggtctttcaggttttgttttaggagacgcacttcctaaattgggattttacccctaggagacgcacttcctagtttgggtcattgaagtttcacccctaggagacgcacttcctagtttgggtcatttaatttcactcctaggagacgcacttcctagtttgagtcatttaagttcacccctaggagacgcacttcatagttttgggtcatttaagttcattcctaggagacacacttcctaatttaagtaattgaagtttcacccctaaggtacgcacttcctagtctgggtctttcaagttatattttgtttaggagacgcacttcctaatttgagattttacccttaggagacgcacttcctagtttgagtcatttaagtttcaccccgaggagatgcacttcctagtctgggtctttcaggatatacttttaggagacacacttcctaaattgaaattttacccctaggagacgcacttcctagtttgggtcattcaggttttactattagtagacgcacttgctagtcaaaccttcttggttttgctcacaagaaatgcacatcctagtcgagtctttagtttactcttatcattgcatcagtagcataagtggtttacagtttttctaacaacaaatctcccgagtgcaaactggggaagaaaaatttgtttgttttgttggtttgattgcaggcacccacctagagaatgagggaattcatttcaaagttatttcaagttaagtcagtagaaggcgcccacctaaagaacgagggaagtcatttcagaattaaattcaggttagaagtagcagaagctcgcggaaagaatgcaagtcgacaatacgagatgactaacagaagtagtctcaatcaagaataaaagaagaaaaacaaagaagaagaagcatccaaaatgcagaagcggagacaagatatggattgctcaatacatggctgagtcacgagctctgtatgtcctgtcgtgctccgaagaagtcgtggaagaatgagtcatcacctacagctagcaagcatcaaggatcaaatctaaagtctacatgaagaactgtaatgacccaaccgatcgttttgtgtattaggaccctatgcccctaaatgagacttcccgtagtggtattttatgatttatgacttgtggggacaggtggttcgggatttggaagagtttggaatggtataggaacacttagttccttaaggctggcctttaaggccaagtttgacttcaatcaacattttgagtaaacgacctcggaatcgagttttgataatttcgatagcttcatatgatgatttcggacttgggcgtctgtccggaataggttttggatgacccaagagcgtttcgacaccaaatagggaaatatgattccttaagtttaagaattgaggtttggaacatgtttttgtgttatcgaggtccgaatggaagtccgagatcgggaatagttccattatgtcatttatgacttgcttgcacaatttggtgtcattcggagtagtataggtcggttcggcgcgttgttagcaatatctagaatttaaagttcaaagtttgattcactttagttttggggtcggattcttagtttcgtcgttgtttttgacgttccgaaaatttgagcgagtccgtatcacgaatacagacttgccagtgcctttggacggggtcctgaggggctcgggtgagtatcagacccctcggagctaattgcaaaactccaaattttcacagtctagtttctttttgtgcgatcgcataaaaggagttggaaggatgggaaaaattgccttgtgcgatcgcacaggcttgcacgcgttcgcactgggtaaagttgtggcctggcccaacttttattctccgcgatcgcacagtaggccttcagtgggccctggccagttgaccacctcgatcgtactgcccctgttgcgatcgcatacaagaggcagctaggcagtgttagaataatacgggacttagtcccttttgagccatttttcttcactcggggcgattttttgagctttcaaagaggagatttcacctagcaactgtgaggtaagtaattcctactacaaattaagttgaatacttgaattcttaggtagattaacacactaattagtgaaaaatcatgggttagagtaaaaacctaggttttatgaaaaatggaagaattacaaaggaattcgccatggaatcatacacaaactatatattaatgatcctaaggttatgggtaagtatttccttcaaaattttccggaatccgagcatgtgggcccagggggtgtattttgagatatttcaaagtaggctaaaatggttaattaaataagggaatttcatgcctttgagtataaattaatgtatttatgcaacatttgactagtttcgagtccttgtgagacgagtttggagtttcgggcgcgttcttgagccgaaaagtaggttctacacgaggtgagtctcctttctaaccttgtaagagggaattgtccccatatgtgattatacatgattgcatgcccttatttgcgggggcaacgtacgcacgaggtgacgacggtccgtgcgtagctactaatattatgttgggtagttttagaactcacaagcattctttacgtgccttgtatgtgaccttaaatgtattttgagtttcttagtatcctcgaattggtatgaaaacattaggaagttacattcgaaattacattgcttaaattcttgtcttcaagcataatctctgttaaatccttggattcttgaaaattctgtgtatgtatatgggcacccgcgtcgcatgtatgattcgtgagagggatatccctatcattatgtcaattgcgtcgcatgttcgattcgcgagcggggtaatagatgcatctatggttcgatccattcgaccctcggcagtgcacatttattttcgcgacgcgtcggccatacgctttcggcatactatgtgctatataattgactgggagtgtttgttttaaatgtatagactgtttcatgcgaaaaggaaatttagtgcattatatgctaatgaaatttgacacgtaaaggtaattgcaaatttacacttgatattccatgtctttgtgattactacgactgttatacctgccgagtttttattaaattatataatttaattttgaccctagtaagtatcacgtctacctctcgtcactacttcttcgagattagacgggatactcactgggtacatatttgtttatgtactcatactatgtttctgtacttaattgtacgggctctgaggcaggtgcatctgggtattcatccggagctcgtccttgacgtaaagttggcgtggacttctcagtgcgctgctttccttgacgcttttctctggcactgtcacacttcctttttcacccggtgagggtaataggggagtttttccactttaagtgacattattcgatttttgggatttattttattcaaagtcgccacccagattttttacggtgttccggaacaccatttgtttattagaaatcccaaaaccgaggaattttgactctgttaaattgtctgcgaaccagaaatctgggtaagaaattctgttaacctgggagaaggtgttaggcattcccgagttccgtggttctagcaaggtcgcttaatgattaaacttggcctaaattgtttagttattatttttatacctatgtgcatttttatatcatttacggcttttattattcttttgtattcaaagaattgtttgatacaggtcacgtatgggtaaacccgtagagtttaaaatgtgtctaaaatcatgtcacacggacgtgcacacaattcttgacactgaactcgtttattaagataaataaaatgtgcaagcgcgtattttgtttggttgtcaaaagatacggaaatcacgtcatgcgggcgtgtatgaaattcctataatattaagaaagtcgttccctaaagtgtctctacgagtgttcattttaatctttatttgtgttacgtaaacgtatacacaattttgagaaaaggtatattttagttgttttcatccaaagttacgtaaaacgtatactccgtagattgatttattttctgaatttaaggcattcactgtataaaagggtatggcctagtctagcccgatttgtatcgctttagaccatcctgattttgactacttttgtaataagaaatgaagctaagtaccgcaatttaaggcatgcatcaatgaagagggatctaaaattcactaactcttaaacaacatgttccaacaaccaaataaatgcatttaattgcagtagaatattttttgattgaacaatttattaatttcagaataaactaaattatgttgtttatctcacaatttatgcacactgatttctatatgttgttctaattttggaaatttaaaagcacttttgaatagcagatttgcattatttgtgtagacttttaaattctttactgatctaaaatagttgtttttacaaattcgatagttatctaaagaaaacaaatgtagagaaagatttttacaaatgctaacgaatctggaacattcacttttcagaaatttaacagatgtttactaggagaaagggggtaattttgatgcaaattcatatgaaacatttttgaatcgcagaatctatatctattcgcttggtgatacatctagaagcaaaataaaaaaatattttttatttggtagatcagaaagtttttataagaaaacagattttttttaaaccagtagttcgtaatacaaatccattttttagttacgtatcgagatcgtgtaatagaggttttagatcatgacccaatagttgcaataatcgctaaactgaaaagctaccaagctttacgaaatgaataactgaatagttcagtcccatatttgcaaatgatacaaaaactaagctattatatcctcatcttttactatacattttaggagatagataagaagaaaagggaataaaagataatctactgttgctcctgtgcaagctaacaacttccaaaagttttgaaacctgtatttccacaactgtttttagaagaaaaagacaagcgactaaacaaatacatattctaggcatttttgggataaatctgaccatttatgggttcagatttctaccttaataccttcttaacaatacttaactttctaacatgataatctaactactatgtaactatttatgcattattatggggtgaatctttctcataatatgcaacatgataatctaccctaatgcaaatctttctcagtaggagctgaagctcacacaaaactaacatgtaactacacaaaatttaatgcattctaaaattaataaacttaaaagcgactaaactagaatggttccaagtactcaggtattgcatatacaacactcattaagattcatttatcagcatattaacaatcttatttcagattttttattaaatataaaaggaacataaaactcagctaaaggagaaggattcagacaaacaaagaagaagaacaaaattcagatttttgagccttttagataaacagttacatacctttcaaagagaaaatgacaaggagatctggaccaaataaaggtccagggagaagatagaaaaaatcagcaaaaagacaatcagcagcaataaacagcaacttcagcagcaactaacccagaaagaggacccaataacaataatggaaatccaggaattcgagtaaaaattcttgagatttttttttgtgaaaatcagaataccaaagatgaaccaataactgagaaccaaacactagaactttgatcaaatccttttcctaatattttttggaaattttcatttatgaatgaagaaaattattttgatatatttttttgttttcaaatgttttcagcagctaaatggatataaaaaagtgtgaaggcaggtgacgagagtaagtattttcgtcttcccctcagtgtaaaaaaataaggtccatttataagggacttcgggatgggatatattaggggatataacttatatatttatccgaaatagtacaggtacaactgtctattcttatcctatagtacagatgtccctctttctggaatattctttttatttaacaaatatttttgaattagcaaggatagagataaataataagaacgaaaactatgggcctgtctattaagccaggatagacaggcccaataataacagaatacaaacgaaaggtctgtctattttgcgaggcccaataattaatacgaaactacgggtctgtctattaagtcaggcccaatttaaacaaggtaataactaatgcaatgtaaatacataaaaagacataatactatactattttcttagttagttttttttttcatttctcttttttttaatctaattaatggcacactgattttttatattttgcttaagcatgatttaattagtttgttaattataactagataacgataaaaataaaactcattatcatagaaaaagatttatcatggcataaattaataaataaatacatacaaacgatagaaattaaataaaaaatcacagaaagtaactatatattaaaaacaaatgaagcagaaattaatttaacggaaaaaaatgtggcagaataaataaaaaataaataagaaacgcgacagaaataaaaaaaatgcggcagaaattaaataataaaaaaaatgcgtaacaacataaataaataagaaacaactatgagaaataacaaagaaaatacataaataataataagaaagtaaaactaaatgggtctaaccgtgaaaaaaccctcaaatcaagactctcgtcttggatctaagatcattgaggggagatcttgaccggaggattgtgatgacccaaaaggtcatcttatgtaatttaagctatatctgtgttccgaggctccgagatcctccgttagtctcacctcgatatgtgtgcgcagcccgggcgtgtagccgggaagctattatgtgaaaatttgattaaaatgagttttgataattaataaatgaatatagttgactttggtcacatttctggtaaacagacccggacccgtgattcgacggtcccggaaggtccgtaggaaaatatgggacttgggcatatgcccggaatcaaattccgaggtcccaagcccgagaaatgaatttttaaagaaatttgttttctgaaaataataaagaattttgaaaatgaataattatgtgaaaaccgtgttaccgggaccgtattgtggttccggagcccggaacaggtttattatatattatttgtcttatctgtaaaacttggtgtgaaacgggcgtgaattgagtagtttcggatcaaaaatgagactttgaggttttaaagaatttgaaatgtggcttggaaagtggtgttgtgttcccgaggtccgaatgagattccgagaccgggaatagtttcgtggtgtcatttataacttatctgtaaagtttgaagtcgttctgagcagtttaggccggttcggtgtattgaagtgaattctagaattttaaagttcttaagattgattaaataagtttcggggtttgatttcgagttccgctgttgtttttcgtgtttcgaaagttcgagcgagtccgcttagtgatttaggacttgttggtatatttgaacgggggctcgggtgggcccaggtgcctcccagaccccgcgcgaggccaaaaaccactgctggtgcacatcagctggtgtgaccgcaggtgcggttgcccagccgcagatgcgggaccgcccctgcggtcccagcctcgcaggtgcgatccccagccctttgcccagagtccgcaggcgcaagactcagcccgcaggcgcgagaccgcaggcgcggtccaggccatctcatgcgcgtgtttttccgcaggggcgaccaaatcccgcaggagcgacctccgcaagtgcggattcttttccgcaggagcggacccttctgggctggcccaagaacgcaggtgcgagcatttttccgcaggtgcgaaaatcgcccagttaatttttaattcttaagtccaaaacagaacacttgcactggaattattcaaagttcagccctctcctccatccccaacctccattagcgagacttgagtccatttttcctcctttgctactcgggtaagtttcgtaacctcgctttcttcaattatacatcactaatcactagaatctaggcctaaaaatatgaaatcaaagtgggaaattgggtttttgggtagtgttaggtttttgggatttttgggtgattcaaccccaatttggggtcgaatcttaaaacaaattgtatattcttactcgtggggatatggatgatcgggttttggtctgaacctcgagtttcgaccacgtgggcccggggtcaaattttggaattttaggaagaatgattagaaataggtaattaggttatgggtttgagttattgagtcattattgatatacttgagttgaatatgtctagaaaatatcgtttcggagccggattataaaggaaatgcggtgttagaaggttgatcgctctattttttacccgaggtaagtgacttgcctaacttcggtgagggaataggtattgtttgctacgtgtttacttgttaatcatgttcgttgcataggtagagtgacgagtacctatgtgatgagagtctagcatgaccgtgagtctaacatgatagtaatcgtagtttttcttccacatcttttatattatgaaattgccattatttgtaatagtatgttgttggctgtggtgaaagaatgagaacgtaaattgttgttgaggatgaatatttgttgtcaaagatactctgttgagattggtatagctgagacccttgccgggcaattgtgtgtttaatattgatatgtaccccctcgttgagcattattgtcttgcatttctattatattgaaatttccttgccattgatatttatactgttctggtaaggaagaggggtgatgttattgttatgcacgaggggacatatcgtgccgagtgttgatattgttatatatgcacgaggggacatgccgtgccgattgatatttattatatgcacacgagggggcattccgtgttgtgatattgcgatatatgcatgaggggacatgtcgtgccgattgatatttgtgatatatgcacgaggggacatgtcgtgccgatttgatatttgagattacgcacgaggggacatgccgtgctctgttatttgattgattcccgcatactggtagctgtttcttcggtttctgtttttactttccagccgcattctcactgaatcgttgtgaattagatgttgtttttcctgtatccccagcatgtacactccatatcttattttatcgttaagttccgatattattgctgccccgttaatatttttcccctatttgttcccatatctcttctatttgatcatacttgttttcattatcggttaattcttgtacatatatctgcttagactaggacaggtgatcgtattatgctaagtctagcctcgtcactacttcggccggggttaggcttggcacttactcaatacatggggtcggttgtactgatactacactgaacttccttgtgttgtgcagaccctgctaccggaccccgtggagcgttctgagggagataccttcagtccacgtcagagcttcgaggtatacactggcgtctgtggatcccgaggcttctttcctttaccgcttcattgtctttctcttttatttccaagacagtgttgtactttcattccagacttgtatttagtattctagtagttagtccgtgagattgtgacaccccggtttcaggagcttacgtttttttacatttgttatgttcttactttccgcatttaaagtttcgttatttttattagcgatgtttgaaggattctgttgggaatatgaaaaagggaaaagcatgttatcgattttcggttaaacggttgtcccactattatctcagtatgtgatggaaattggttgaagttgatgagttagcgttttattccgtattaaatgattttaaattgctattgcaagttatacgttggttggcctagcgggttcaacgttaggcgcattcacggcctaaagggtgggaatttgggtcgtgacaaggattttttaacggctaggaagatgatttggcctctttagatccaagatctacggattttggttggattttgggggatttggttggtaagatgaagtagaggaggagaagaggagaagattgatgttattttgggattttttggagattggccgccgccggtggagaattctgacgggcggccgcgccgtggagggggggcgacggcggggattggcggcgggtggcggcggcggaaggtataatagggaggtgagaagtctttgttttagagagatgtgagagaagtggaagagtggggagtttggaaatgaggggggtggaggttttaagacagttttatattaaaaagtgggtgagttccagaccgttggatctactagagatcaacggtcaagatttagtggggggaatgggttggatcagatttttaaagaggttgggcttggtttatggtgttttttgggttaagtttaggattgggctagtttaaattggcccaatttggccaagaccccattttctttgattttaacaactaattaattaatttcaattaagtttaaaccaaaaaaaatgtagtagttaactttaacttaattttgtctcattatagattaattaataaattaattaagggtaaaataattaatttactactcctaatcatttaaaggacaaatttcacaattttgttaaaaagaaataattaaatcaagaaattaacattaacacactttatatcaaacaattatatttatttaaatgataactaaggttacgtgcttaatcatgctgttttaaattatttatggatttaaatgacggattatggctacgcaatgtgaaaataaattcgcaaatagcattaaaattcaacaataatccgtaaaactaattaatctagcgagattttgtaggattatacgataggtaaaaatcacgtgttcacagctgcccctctttgctcggaaacacgaagagttttccgggcaaagacaaagtgagcaaccataaacgactttatccattcatatgttccattgcgaagcgtttttgaaaggtttgactgaaccctgtttcaaaggttgcctacatatccttggctataaaggaatcatgtcagtgtagttctagaagttttggtagctaggactaccgagtaactgtggtttcactgcgattgctgctgttactgctattgatctccttattacaccaaagtaacaaaacaaaagactaactaaacctatcagctgctagttacaagattcctatctaagacttggtcttgagtcttggccttttgctgactcggacctggatcttgatgcttgttagccgcaggtgctgctttcgtcttatcgtttttctgatcaaacggatggcttcaatctcgttctgaatagtccatgttttccccgtttctgcactttggattcaaccttctcttttctctttttgtttttattattctggatcgaaacttcttcttttggtcatctcgagtccactgtcctaaaaatgcaatctttgcaaaatcaaaaagcaaacgaacgaaatttcctgccccagttttcactaggaaagtttcgtgagttattgtaaagaaatctacactactttattattgaaagcaatggaaaaggccgggagcagtgcacccgggggtattgtagactagggactgaataccctatatctcaaagcaagatcaactaggggtgggaccctatgttgcaaaataacaccaactagggattgtgtaccctatgtcggaaaagaaatcgtcaaccagggaatggatacccttgatcggcatcaactacgggagtgtataccctgcgtcgggaaaagaaatcaaccagggaatgtatacccttgattggaaaagaaatcatcaaccagggaatggatacccttgatcggcatcgactacgggagtgtataccctgcgtcggaaaaagaaatcagccagggaatgtatacccttgattggaaaagaaatcatcaaccagggaatggatacccttgatcggcatcgactacaggagtgtataccatgcgtcggaaaaagacatcatcaaccagggaatgtatacccttgattggaaaagaaatcatcaaccagggaatggatacccttgatcggcatcgactacgggagtgtataccctgcgtcgggaaaagaaatcaaccagggaatgtatacccttgattggaaaagaaatcatcaaccagggaatggatacccttgatcggcatcgactacgggagtgtataccccgcgtcggaaaaagaaattaaccagggaatggatacccttgattggaaaagaaatcatcaaccagggaatggatacccttgatcggcatcgactacgggagtgtataacctgcgtcgggaaaagaaatcaaccagggaatggatacccttgattggaaaagaaatcatcaaccagggaatgaatacccttgatcggcatcgactacgggagtgtataccctgcgtcggaaaaagaaatcatcaaccagggaatggatacccttgatcggcatcgactacgagagtgtataccctgcgtcgggaaaagaaatcatcaatcagggaatggatacccttgatcggcatcgactacgagagtgtataccctacgtatggaaaagaaattaaccagggaatggatacccttgattggaaaagatgtagctagggtttggagaccctatgccacttcgattttgggttgatttcaacaccattgctcttctttttattttgaataagtgtgggaaaggatttttggagaaacttccctttttggagttgttgctgcagagctgcttctagctcttgcacccgttcttttggttacgcttgccttttcaaggttgttttgagttacacctatttccttcaaacaaagaacaatttgtttgtttgaaacggtggttggttttgcggccttgattttcaacagcttgatcttagttcttgtgacgaagatctcgaccacttgctttcttgctggggattgggtttcatctctaatcacggggactctggctttttccatattttaccatggcgatcggtcacgtgggatccgacattcgactttatatatatatcggggaagttttggcctctcaaattccgctgcaacggttagtcgcgtgggacttaaccttttccaactttatttttcctccatcggccttttatttctgattttcctccaagtttaacttttaaagcatttggagcatttttggcttttcagaccttttccaagagcgttagcctcgtgggactcaacctttcacttcaattgcctttgtaggcatttccattcgattttcccctttcaaaagttttgtgtttaaagcatcggtcgttgcggccagtcgggattgactcgatgcccctgatgaagcttggcgccttttgcatgttggcccatgtcaaacgaaaaccctgtgaataaattttgccatcctttcttggtcttgctttagaccaaaatgaattgaaggaaagataacaaagaaacggagacaatgaattttgacaagaaatatccctttcgggggagaagagaagaaggacttatctggagtgtatgcggacttcaatgaacatgacatgcgtcttggactgaatgtctaatctatataaaccatctgactcccaaaaattcatcacgactttctacctcgaggtcgagaaacctttcccctaaccatgtcgatattagtgaccaatcctctttttcgattagtagtgcccttttcgggtctaacctctctcatttctcttctcgccatcaccatgtagtgctctttgtgagtgttcactaacaagactctctcatttttagtttctctactcaccatcgactcatggtgcccgtgtgggttttcaccaataagactctctcattttagtttctctcattgcttgcatcggatccaagtaaatgtatcctccaattctggcctctttcgccgattgatcggaaggacttgaacaggatttggggtaaaggaatttgtatcgatttacaactttgaacttttcggacgaatcattgttgaattttcacactttccccagcttaaactcttgggggaatgtggatttttattttggtgtgactgaaccccagggagaggctctacgtatcctttcggaatcaagtcagacgtagttcaagaaacatttttttttcttttttgtttgttttgatttttttttaatcaacactttaagttccaaagagggtaatcaaggaagattaaccggcttaaagggtttacaaaactggtagtgtttggggtagcacgaatgaaagcctttatcatttcgaccacgaatatcatcacgaacagggtcaaacataatatcgtttgactgcgtctgcattgacagtcgcttcggggtcatttccttcgatgtcccccaagtacaatgctccttttggtagcaatttccttatgatgtaaggacctttccaattcagggcaaattttcctttcgcttcttcgtggtgcgggaggatacgccttaggacaagttgccccacttcgaagttcctgggccgtaatttcttgttataggcacgggccattctttgttggtaacactgcctgtggcaaactgcggccattcttttctcatcaaccagagtgaactgttccaaccgggttttgacccattcatcatcctcaatttcagcttcgacaatgatctgaagggagggaatttcgacttccgccggaatcacggcttcagtgccgtaaaccaatagataaggtgtagcccctactgatgtacgcacggtcgtgcgatatcccaataatgcaaagggcaatttctcgtgccattgcatggaagtttgaatcattttcctaagaattttcttgatatttttgtttgttgcttcaatggcgtcgttggctttaggtcgataaggggtagaattgaggtgtgtgatttggaactgttcacacacctccctcatcaagttactgttcagatttgccgcattgtcggtaatgatagtctttgggataccaaaacgatagataatgtttgaatgtacgaagtccaccactgctttcttggtgactgctttaaaagtgactgctttgacccattttgtgaaatagtcgatggcaacaaaaataaatctgtgtccatttgaggcttttggcttgattggcccgatgacatcaattcccgaggcaacgaagggcaaaggtgctgacatgggatgtaactctgagggcggtgcatgaatcaagtcaccgtgtatttgacacttatggcatttccggacaaagctaaagcaatctttctccatggtcatccaataatacccggcccgcaagattttctttgcgaggacgtacccgttcatatggggaccgcatactcctgaatgcaccttattcataattttttcagcttctttggcatctacgcatcttaatagattccgatcgggagtcctcttatacaatacttccccgcttaggaaaaaactgttggcgagtctccggatggttctcttttggtccccaatggcctgctccgggtactcttttgttttcaagaatcttttgatatcattataccatggttggacatcgggctctattccaatcgtgttacaataaccatgtctttctttgatttgaatttccaacgggtcaatgtgaacattgcccgggtatggaagcattgcagctagggtagccagtgcatcagctaactcattgtggcatcgagggatatatctgaactcgacggctttgaatcgtttgctaagatcttccacatgttgcatgtatggaaggagcttaacatctcgagtttcccattctcgctgagcttgcttgataatcaaatcagagtctcccatgattaataactcttctacatccatgttaatggccatgttcatgcccattaaacaagcttcatattcggcagtattgtttgtacagaagaatcgaaggcgggccatggcgggatagtgttgtctcgtgggtgaaatcaagattgccccaatcccaacaccttttgcatttatagccccatcaaagaacattttccaagtgttggctttctcagaatttatctcgactgaatttacctcctcgtctgggaagtaagtacttaggggttggtagtcttcatcgacaggattttctgccaagtgatctgacaaagtttgggccttcattgccgtgcgagtgacatagactatgtcgaattcggtgagcaaaatctgccactttgctaatcttccaatgggcattggcttttggaatatgtatttcaatggatccaacctggtgatgaggtaggtggtataagccaacaaataatgccggagcttctgagcgacccaagtaagagcgcaacaagttctttccaatagcgtatacttggcttcgtagctcgtgaacttcttgctcaagtaatatatggcatgttctttcttcccggttgcgtcatttttcccgagaatgcatccaaaggaattttctaacaccgtcaggtataagaataagggtcttcctggctctggtgggactagcactggcgggttcgacagatattctttgatcttgttgaaagcgttctggcattcgtctgtccatttgatggctgcatctttcttaaacaacttgaatataggctcacaagtggacgtcaactgagcgatgaacctactgatgtaattcaacctacccagcagactcatgacctccttcttggttctcagaggtggtagatctcggaggtggtagatctcggatggactttatcttagtcggatctaactcaatgcccatgcggctaactataaaccccaatagcttcccggaaggaacaccaaatgcgcatttagcatggttcaatttcaagtcatatttgcgtagccgttcgaagaattttctcaagtcccgaacatggccttcctgtgttctggatttaataatgacatcatccacgtacaccttaatttcttggtgcatcatgtcatggaaaatagcagtcatggccctcatatatgctgccccagtgttctttagaccgaatggcatgactcggtaacagtaggtaccccagggtgtagtgaaggctgtcttttctgcatcctcctcatccattaagacttgatgatatccggcgtaaccatccacgaatgactggacctcatgtttggcacaattgtcgaccaggatatggatgtttggtagcgggaaattgtctttgggacttgctttgtttaaatctctgtaatcaacacatactctgagtttcgcgtcctttttgggtactcggactacgttggctagccatgtagtatatctgactactcggattacaccagcttttagttgtttggtgacctcttctttgattttgtcactgatatctattttgaattttctctgcgtttgttggacgggtgggcagtcgggatgagttggcaacttgtgtaccactaaatcaacacttagtccgggcatatcgtcataggaccaagcgaacacatctttgaattcgaatagaagttgaatcaatgcgtccctagttttctcatccgtgtgaacgcttatcatggtctctcgaacctcttctgaattacccaaattaactggctcagtttcatttaggtttggcttagtcttattctcaaattgttccaattctctgtttatttccctaaaagcctcttcttcatcatattccggttcttgattcattatttcgaggttagacaacgtattaagatcaaagcatgaaatccgcaagcatgtcatgttatttaaagccgcattattaggactgaaaataagaaaataagcaaaaatcagaaggaataataaactatgaaattttgatttcatttcattgaatttgaacataggagggtttacatcggaattcaaaaggcagtaaattaaaaacacttgagttacaccctgaaataactcatagtgcaagaaatatggcaaaactgaactaccgggtctcccgcctgacggggaatggagtagtcttccaattctgtaatttggcatttgggcccatgtattgcacctcagcggtgcttgagccttctcctggctgaaccatgttagtttcatataacatttgtctcatggccccacatatttcctcaatttcttcggtcgtaaagccctcttcttcttcttcgacatattgcggttcgatgaaagtctcagtaatatgtgggactggctgaggtagttcccatccattgtttttgcgggcgttggcccattgcgcatcttcatcactggcttggaaacctatgccaaagaatttttcagcggcgggtagagagatcggttcagtaatgccttgcagggataccccaagcccctttccgggtttaaacctgtaacaaatcgaccggtcgttttgagatccaacgcgtcgttcagtagttgggagtcatgaaaagcttcgtttcgggtattgtgacttgtgggtattgtcagtgttgaaattcagggggttcggggttgaattgaaaggaaaattctcatttcagaagccttaagttgaggaaattgagtaagactggaattttgagtaaattgtgatgaccaaaaatatcatcttatgtaaatttaattatgactgtgttctgaggccccgaaagcctccgtcaatctcacctcaatgtgcgtccgcagccgggcacgtagccaggaagcctttatgtggaaatttgataaagagttgaatttatgataattagttgaataaagttgactttggtcaaaaaatttgttgaacgaacccggatccgtgcaacggtctcggaaggtccgtaggaaaatatgagacttgggcgtatgcccggaatcgaattccgaggatccaagtccgagaaatgaatttttaaaggaaattgttttatgaaaatattaaaggcttatgaaaaatgaaccttgatgtaaaacatgtgcggtcgggcccgtattatgatttcgtagcccggaacaggttcaatatgtgttatttaagttatctgtgaaatttggtaagaaacggacttgatttgacaggtttcggatcaaaatgagaaaattggagttaatgaagttttgaggatttttaaagaatttgaaatttggcttgaaatgtgattttatgttcccgaggtccgcatgaaattatgagaccggaaatagttttgttatgtcatttgtaacttgtctgcaaaatttgaagtcattccgagtagtatagatcggttcggcgcattgaagtgaatctagaatttcttaagttcttaagttgattcaatttggttttaggattgaattttgagtaaacgacctcggaatcaggatccgaaggttccaccaggttcgtatgatgatttcggacttgggcatatgcccggatcgggatttggataacccgagagcgtttcggtgtatattgtggaagtcagcatttttgaagaaatttcttaagtttggcttgatgcgcatttcaatgatatcgatgtccgtttgggattacgagtttgggaacagctctgtatggtgattctggagctgggagcgcgatcggaagtgaattcggatgttcggaggtcattttgaagtcatttggctaaagatagaaatttgaaggtttttgagaagtttgaccgagagtttgactttttgatatcggggtcggattctaattccgaaagttggagcaggtctgtaatgtcgaatatgacttgtgtgcaaaatttggggtcaatcggacgtgatttgataggtttcggcatcggatgtagaagttgaaatttcaaagttcataaagtttgaattttagtgcgattcaagatttcggcgttgcttgatgtgatttgaggcctcgagcgagttcgtatcatgttttgggacatgttggtataattggttaaggtccaaagagcctcgggtggatttcggaaggttaacggaatgaatttcggacaaaagaaagaaggaaaattgcagaaaatttctgcagattttggacagcaattagtgcacgaggagcctactttggaagcttatatatcgaaatctataaggaactgaacatttgcaaaacatgaaagttgtagctcttgcaatctagttttcagaatattaaaccatgtatcatttggacatttgtacggaaatgtatgatcggctgaaggtggctggtcgagcagtttcgatagaattttcagatgcacagggccgactttagaagctcatatctcggaatatataaagagttatatggtgtacaacctatcaaaatatcttcgagtataatttctaaatcctcaaaccgtttgttatttggatatttctacaagaagttatgggtgtcttaacagaaggtgttcaacaagggaatttatgtacaacctgtacagcacaagtgtaaggtacaaccaggtgaagcatgagcagattctttaaacacgaatttggcccattttcttcatttctttcatttggcttggattattttggagagcatttcaagggggatttcatcaagcatcaaaggtaagttgtttctacttattttcaagttaaatacaagatttattacatagatttgatatgaaaattgggaaaaaatgtgggaatttgctaagaaacctagaatttggaaaatgtgatcttttgccacgatttgagcatgaatttttgaagtaaattgtataattgaattagtaaagcttcgggtagagattttcttcaagaaatttcgaggtccgggcacgtgggcctgagggcattttggtcatttcattgagtcgggctgaggaactttgtaatttgaattggttatgatctattgagtatattttcattgaattatcgttatttggatagtttgggagcgtgcgcatccatttttagtcgtcgtagaggcttggaagccgatgatgaatcttcggagcgaggtgagtctcctttctaacctcgttagagggaaattgtccctctaggtcattaaccacccggaatccacccaagggccccgggaccccgtccaataacaccacctatcccaaaacataacacggacttgctcgagccctcaaatcacatcaaacaacgcctaaatcacgaatcgcgctcaaatccaaatctttaagacttaagaaatttcgacttccacattcgataccgaaacatgtcaaatcacatccgattgaacccaaatttttcacacaagtcgtcttcgacattacggacctgctccaacttccgtaatcgcaatcccgaccccgatatcaaattttccacttccggtcaaattcttcaaaaaccttcaattttctatttttagccaaatggcttcaaaatgatcttcggacatccgaattcacttccgatcgcgctcccaacttcagaatcaccatatggagctattcccatactctgaaatcccaaacatacgtcagtatctctgaaatgctcttcaagccaaacttaggaaattccttcaaagatgctaacttccacattatacgctaaaacgctcctaggttatccaaaccccgatccggacatacacccaagtccgaaatcctcatacgaacctgctggaaccttcagatcctgattccgaggtcgtttactccaaattccagtctgagtcgattctcccaacttaaggcttcaaaaatgaatattctcctttcaattcaaccccgatcttcctgaatttcaattccgaccatacgcacaagtcaatatacctgaaatgaagttgttcatgacttccaatcgctgaacgacgcgctagagctcgaaacgactgtcgggtcgttacattctcccctacttagacagacgttcgtcctcgaacgtgccaagaacttctcttggattatctgaaatcattgtttagcacctcgtgcatctgcccgtgctaccacaacccatttgagcacacaagtttgatcaaatatgaagatatcctcttcttattcatacaataagtttagaacttagtcccaacacctgaaattctctaccatgcatgtttttaatatttgaacaccgtatcaactaccacacgaggcaccagaacacaactgcgtacccttgctgaatcggcaccacatactgcataacccatcacctgaccacaatgacgctccctgaacctttttggacaaaattctatgatcctaatgctcccaatgcaccttctaagatatatacatacattttgctataatgctgacgatatcaccacaacagagggtatgtgtagaaacttctaaccaattgcagagttaatcacacattgacatcttttctcttttcttagatcatcatttcattacgcaccaaataatggtgattgacctgtgataaatttcacataatctcatcacaccgatccccgaatcgataaatctcgtatcgcccagtatgaactgctcagataaccaatcatcccaggcataactagcagtctcagatgatgccacaacgtaccgataggccacaactcgaacatgatacacgagacatgactccggaagggactactcgactcacttaactaatatgaacttctacagaatacaggaagcaaaatacaagaaaataattatagggaaccacactcagcatcacgtggatgcggcatgcaacatgattcaaatagtatacctgtggcggcgtgccacccaatcctatcaggaagctcatataaggagacacatacggagctgaattgcctgctattacacattactgaataccagctataagcacactaagtgcatagtaccattttggggagattgatagattcatatgctacaaactcaagcacaactgaggtgcgatatataaaatctgaatctcgagagccatcttgctcatataacctcatcactatgcggaatctcaacacataagaatttatcaagccgtttcataactcacgcggcacattataatatcatatgaatttgacgaagatagaacaacgcctgatattccaacaccctctccttgaggagcgctatactgaaatgaacacatctgactcgcatgaagcccataattcttgtttaaatccattcattcgcttcaagtcgattctgctcgcactgaactaggttgatagccttacctgggtccgtaataacccaccttttcctcataacccacaagagcaaccatcatagcagagacaaacaccccacaatccacaaccaactggaccgaacgcccttaaggcatatattctcaaataagcaatagcgcacttccttataagtgtccaaatcttcaatcaatcaggtgactacaagccacacttacataatcttcccgtggccacactcccacgactttttgcacaggtagccagtatgcgcatccataccactgaccaccctaaggctgtaaaacaattcaaggacccggtctcagtcgatactagaaacaacatcagctcatactaaacattcaaatcccttattcttgctcctctgagctcatgacatccttgttaataccgaaccgcattctcgattcttacttccagttacatactgcttactgcacctaacgtgccgataagggatggcataggaattccatcataactcctgaaccactaatagggtgaacactttatcacatatagaaatcttttacttgcctcaattcatgagaaccataacaacacacaagtgagttctcaccctcacaatatatgcaaatccttaagtagtggactgaaccaccatacccttccgtgatccgcctacacctgacaggccatagcacttgaatgcttccaaatgtaatctattacgacggccgacatgccccacacacatcttcaccaatcatacacatactcagtcacaccgaaggaactgatcactgccgaacaggcaccgttcccaccatggctaaccaatccatctccttttaatcatctttaattgcctcaagataatagtaacttccttcaactcatagcaactcaaccctcactcatcccgagtgaccttgattcacgagaccatgctgcctaaatcccgtaacccgtcccacaacttcctgaaaatctttctataattcgaagtttatttctctcactcctccaacactatcctgcgtgctgaaaaaaatcgtcgaacactcaactacttttccttctcctcagagattatactacaaaagctcgattcttaatcatattgcttcttgaaacactcaaacaccacagtttcaaactttcaaattcactaggaccactactgagagtcacctactctagctggccccgcatacaatcaactccaagtctcttctagcacacgaacatgctcttcaatgaagcacgtgactaagtcactacccttacaacttgcctatgccttaagcacaaagtcttaatcttccagagcctaaccctggtccaataggaccaatttgcacatatttatcatatgccatgctcacttactgctttactcctttctcttagttgtaacaacttgccgatatgccgacaatccgcagtcccatgaggacgcaaccttacaacccaactgcaagtggtgggactcccctacttagcccgaagctactccctgcaccactctagacaccgctgagatcttttcttcttgttgacctgaccttgctcaaccaatccgtccaaatattccgaatttccctgttagcattccctaaatattcaattctctagcactatttacacattctgcttcttacgactagccactgggatccctcgcagaaactttccaaccccactaccgctatcctactcacaaaagataacccacctgtggaaactcaccaaccgacaccttccactacgctgtgagacacactttctacgacatcgagacccccatcctaagcttgtcctccttcatcgacttcactggtctgtccgctccccatggacgtccactatgcgcgcgacaacatcttatgattccaagctatgttgcatccttcttcatccctaacagctcctcttggtagcatctaaccttccgccaaataaccaacatttcggtttaagcttatggacctactccctgtccacaaaaatttctcaaatcacttcaactcctcattaaggcatgaaaccgccttaccactgaactcataggatatacttccacttcttacttagttggactcattcctttaagcaactacctgactcccgtctctgacgcctgacatttagagatttagccgatacctgatacttttcacatggcttccttcatcgcatgcttctcaattgcggcctcaattcaaaatcatcctctgaagcccttgaaccagcagatcaccacgacttcaaactctctgatgatcatctttcttgagctgcctttattagaaatgctcattcagatacttaaccaccacacaccacggtctataacagttgcttctttaacacagcttcacaacaacctaacccaatgcaaccgaagaactataacaccggcgaacttaacacgttctattcggtcaaacatcggtatcgcaacatgagttaatactccaccttgctcgatgacaccaagcttcattacttttatcacccaaaacctgacctatttacaattcattgtctttcctctgccggaactgaaataccgaaatctcgaaatcacactctaggaagacctcccttcaatccattcatcacccccatcctatgggaaaccattctaccatcatatcgacatcacgcgataaccaatcgaaaacatcatcactatatgagcatagcctcaaggctctcagaaatacagcaactgagctgaaataacataatatcctcctgcggggcgacaacaatagcccaatcgactatgcatggaaaacatcatgtaccgtatctgtatccccattacagttactcaaactcttgattataggaagcgcttcgcgacgtataagatagagtaggaagaaacgtaggcataagtctaagaggaatcaaattgcacgatgggatatcaagaagggaagtactcctaacacccatgtagcctctcgaagataagtacatacgtctccatactgatccgcaagactctactagacttgctcatgactcgtgagacctacgggaacctagtgctctgataccatattgtcaagccccaaaatccatgaggtcgtgatggcgtcggacaccactgtcgggcaagacaatcattaattaatagaagtgaaatttcctgtttcagtacttttgaaatcgttacttttcatttttatacataacatctatatagaaatccatttcgtaggaaaagcaatcgttcatttatgtaaaaacataacccaaatacatatatcccagaacccggtgtcacaagtgcatgagcagattctaagagtttatacaattactacaaagcttgtctgaaatacagattggacaagtaatttagaaataaaaatacagtacatagagggtgactctgtcggctacgggttgtctctgagtaatgcagctcgcctaagtctccaagtaagccctattgttatgttagtacctgtgcaacaaaaatgcacagcaagtgtagtatgagtacgaaaacaacgtgtactcagtaagtatcccgcctaacctcagagaggtagtgacgagtggtcgacttgacacttgctataagtcattctagtataatttaagtgagacactaagcatggatatcatagacatatttaataatgaccagggaataagaaatatacatttgaatcatatttagcaccttaaactttcatcatttcagtttggcaattaaataataatcaggagtaagaagcatagacttacttcacattcttacatatcaattcttattctttttgactagcaagttcataactctttatactaataaagaagtataaatcaaagaaagtatgtagcatttatcatatgcaaacaactgccgagggtcgaacggcgcggaccaacaataataaaatgtgcactgccgagggtcggacggctcgaaccatagatgcatctattcaccccgctcgcgaatcgatcatgtgacgcggttatacatataaataaatacggctagcctgctcgggaatcatacctgcgactcaggtgctcatctgtacacgtattcacactatagattcgtatttcatcaggaagacagcttctcaaattcaagtgattaaattctctttaggtgaacatgaagatatagtttaaaacatttctggaaaatcttttgccaagttttaataaggttttaaaaacatcattggttcctcaggaacacaatcatacaaggaagattcaatttttcttttcaatgattgaggaaagtaagttcaggctctttcaaatattcaattcctaacttggtaatatcaccagacaaatatcttttataggatcacaagtataacaattaaggcatgctagtgggtcctagactacccggacatggtataactgtagctacgcacgaactcctgtcacctcgcgcgtacatagcccccgcaagtaatttcatatatttatttagttaacctagggggacaattccccctcacaaagttagaaaggagacttacctcgctctgaaattccctaaacatcctccaagccgttttgacgactcgaatcattgcaaaatgctccggaactagaaaaattacggcaaactaatgagaatatactcaaatacttggtaacaattcaaattatacaaattcccaactccgcttagtgaattgaccaaaatgcccttgggcccacgtgctcggattccgaaatttctcgaagatatactctacccataacttcactagtccaattatacaatttactcaaacattcatgctcaactcgtggctaagatccacttttaccatatttctagattttctccaaaaccccatattttcccaaaattcatgttcaatccatgtaataatcttgtatttaacttagaaatatgaaggagttacttaccttgtgattcatgacgaaaatcctctcttgaagctcctctaaaatcgccaaaaccaaagaagaaatgaagaaatgaccaaccattctcggttttaaaacaatctgcccatgtcgttttccgcacctgcggtcttctgctcgcacttgcgcttccgcagttgcgctcaatctcccgcacctgcggcttactcaactccagccaaacttcgcacctgcgatccaaatgtcgcacttgcgccttcgcaggtgcggaaattcccccgcacatgcggttccagtctagcccagccaccttcgctcctgcggcaccaaggccgctcctgtggccaaagcctcgcaggtgcggtcacatcagatgatagcaatttcagcccttttcccaacttcaaatttgatctgttaaccacccggaatccacccgaggcctccgggaccccgtccaatcacaccaacctatcccaaaacataacacaaacttgctcgagccctcaaatcacgtcaaacaacgccgaaatcacgaatcgcgctcaaatccaaatctttaagacttaagaaattttgacttccacatccgatgctgaaacctgtcaaaccacatccgattgaccccaaattttgcacacaagtcatattcaacattacggacctgctccaacttccagaattgcattccgacctcgatatgaaattttccacttccggtcggattcttgaaaaaccttcaattttctatctttagccaaatggcttcaaaatgatcttcggacatccgaattcacttccgatcgcgctcccaactccagaatcaccatatggagctattcccggactcggaaatcccaaacatacgtcaatatctctgaaatgctcttcaagccaaacttagtaaattccttcaaagatgctaacttccacattatacgctaaaacgctcccaggttatccaaaccccaatccagacatacacccaagtctaaaatcatcatacgaacctgctggaaccttcagatcctaattctgagttcgtttactccaaattccagtctgagtcgattttcccaacttaaggcttcaaaaatgaatattctcctttcaattcaactctgatcttcctgaatttcaattccgaccatacgcacaagtcaatatacctgaaatgaagttgttcatgacttccaatcgctgaacgacgcgctagagctcgaaacgaccattcgggtcgttataacaggaagtctgaatcaagagcacacaggaagaaggtgatagggaagcatgctagttaatagagacatagagcaagtaggggtagattggaattctacaatagccaagttcacaacaacatactgacttagagtctagacaggaacaacatatgtctaaattctaaagtagttatgttaactagaagcaatagacagtaaaagcatagaaattaagtgtagtaataatcatgctagagaggacaggggtttaactacacagagttagtcatgtcaattgaaagtaattagacaagataggattctgagacataaaataagcatgctggttgaaggcaataaacaggaaagattgaaatactctaactgaagtaaatatactgattaaagaaataaacaagaaagagcgaaacttaaacatgctgatcaaagcagtaaacagagttactatgcagtagttacactagtgcagaagagacatggccttaacagaagtgaagcaacaaagagcacacagatttgaacttcatagtataatgaacgacattaggagtatagccttggctttcatccggctagacaagcaatgaaaacaagtagcaacgagatgagagtaaagttttgtgtgtgtgtatttaaactgttgttcgtcctttaaagaggcagaatgagggtgtatatataacacttagggagtaaagaaaataaggtaaagaaaatcacagttcaatcaattggggtcaatcagccaattatggaatcaattcaactagagaaatccggaaaagacccatttaattgggggagtcaattaacggtcagaattggggttcaattaaggcagtaaaccaaaatcataccctatagggagtcattaaaatcccaaaccatactgataattaattaaggcaagtataatcaattaatgccgcaaataaggaaacaactaagaatcataacaactactgattttaacaggacagaattattcaaattccctaaatagaaatcaattaagtaaaatctcacagaatattgcattcaacaggaaaactggttcgaatccttaatagaaatcaattaagcaaaaaatcccaaagagtactggatttaacaggaaaatcattcaagtccctaaatagaatcagttaataagactggttcgcagaaataaaaatagtaacggaacaaaattgaagaaataaatataacaaacaaaacatctagggttgaagaatatacatgataatcagtcaagatagtgaagaacacttagtttaaacactgaaaagttaggaaaacctttgaacaaaagtttgtgatgaaccctaatttcagaaagagtgaataaaatcgaagcaattaactagaacaaaagattttcaaaggaaaacacccaataatactcgaatcatttcagatctacaaagatttgaacagattcaaagactagtgatcacgcccaactatgccttataaaaaggacaaagtggtcattgcaaatataattcgggtagttagcctagagtcgaatcccacagggaattaacccatcaatcacttttgtcagactcactgaattctccgtaatcaacttcccagatattttgaataacaattggtgatatttctactaacgataactgaataaaattaattaaacaaagaggtaacgatgactgagttgtaaacaaatatgagaaggatataagattatgacttcccctattgatggaatcccttccttttatttctcatatagatttggctaatcttctcaatcaattatgacttactaccgtaaatctctcccgagcaattacgataatttactagacgcactctcccgagttacactagctggcctttattacagctcacttagattgcacccaaggtttcgttattcctaatcccacatttaaaccctcggttattgattcctcatatactttgggagtgctgttattcaaaaactatctaaatatgcactatctcccgagtaatacatactaaataggcacagctaattgagggcccttcaattaactgcaacaagaacgtagttgaacaaatagagattaacttggaaaaattatattatcataacaagaagttcaaccctcaataggttccatcaaaaccctagactaaagattagctactcatgctagaacacaatgaaagcataaaataattcataattcccaaaataatgataaaagatagagaatagaaaaattctaattgtagcttggtcttctcacgcttgttcttgcctccaaagtgagtctaaaacaagattaaacctttcttggatgactttatggggttttaaatagggctaggataatttctcccatttttacacttaggtccctgaatattctgggcactcggtgaactgcatttttctgcctcgcttgcttggccaccgcgttccagccacggtcgactgcggtcgcggtgggctattgttcagtcatccttcgccttttcttgcttattttcattttggttcttcttgattggccttatattcctgttattgactccaaaacgctccatagtatcttcctaacttggattatttcctgcaaagcataaaaacactaattagagctttttgttatcattttgcatttaaaaaaacaataaagtatggttcatttagagtgtaagtagcgtctatatatcctactatcaactagtgaaaataaggttttcagaaatagtagaggcaaaagaaaattggtcaaaaactacgaattcgcactaaaaaataagaggaaactcatactcaaaaacgagaaaggacacagacaggcctatagaaattttttggcaagaaccaggttgaatctccatgatgttctctcaaggatctatgtaatctaatagccagggggtataggaggctagtagttgtcagagaatgcacggaaactccatatatgggagcttttcgctggtgacggcgattagggttagggttgagttgagagagaatttgagaggttagggaaccagtgaccatgaaaatgaaagagtaagggggagggagggggggttgtttgtgaattaaaaaggtaagttttatcgtggaccgttgatctaaaagatcaacggccatgattaaacagggttattgggtcgggcaggtctaggttgggctcacggtgaaatggggtggtattattaaggggtttgggctggaattaaaagggtttggtctgaaaaattagagaagttaaaagggctatttgttaaatacccaaataattgataaaaataatttataaaatgattaatagattataaaaaatgatttccatgcttagaaatattttaaaataattactcaatattttaaaaatacaaaaagctattttctggtaaaataatgtaataatgcacacacatgggctataactacaaagttattgtaattataacccaaaatgtaaatgtggctattcgtgaagtgattaaagcttagtataaatataaatagcaaaataaatcataaaattgttataaaattatttgtagtgcagttaatgattatttatatgataaaatactggataaattaattaaaaatcttcatgctgtcgcgccccctttttcctctttccagcggagtcagggtttcgacattctttgggacaactcatgtcacgacccaaatttccctccacttggtcacgtgacggcacctagtctctacgactaggtaagcctaaaacatgcggaaaagtaaattggaaactgggataaaacattaaagataaaaacaatagccataaagcttaaggcgctcggcatttacagtttagctcttcccaaaactcggactatcactattgtcacaagcttaacactatagctcaatacatcgaaactgagagtatttctgcctaaatacctcgactatactaagataagagagggactcagaaggctctgtggacgcggcagaaatacctctaagtctcccaaagactgctgatgctgctaatctcagtactgcgtacgggtacctggatctgcacacggggaaaacatgcgcataagggcatgagtattccacattcggtaaccagtaagtgccgagcctaaccccagtcaagtagtgatgaggtcagggtgaggctctattgattttataaatagacagttataatctaaaggttgaaataagcaaaaataatttacggaagtttaaagtaaaaaatagaagagaatgatgtaaatagctctcagctcagcacagcatataacgcaataaatacacgtgcaatacaataagggggaaagatctcaggtctcggcccacagtcccaatgtaaatatgcgatgcaatgcagtacaggggaaagatcacaggtctcggcccgcagtcccactgtaaatatgctatgacatacaagggaaagatcacaagtctcggcccgcagtcccagtataaatatgctatgaaatacaggggaaagatcataggtctctgcccgcagtcccaatgtgaatatgctatgaaatacaggggggaaatcataggtctcggcccgcagtcccactgtaaatatgctatgaaatacaggggaaagatcacaggtctcggcccacagtcccactgtaaatatgctatgaaatacaagggaaagatcacaggtctcggtccgcagtcccactgtaaatatgcaatgcgagatgtataccagatgtagcgtaattcaaaagtttaggaaaaaccgttggcaaaaatagagtaaaatacatcaacgatgttcaaatagtagtaatgagtggaaaaatcaagtaaaattggttggtaggtttaaagcttaagttgccactcagtctagttcagtaattgtaatatttggagtgaaaatgagatatggcatagtaagaacgatgtaaattcggtgagaataacccatgcacgcacccgtcacctcacgtacatgggggggggggtttaagtaaagatcagttaaaatgcctaaggaaaattccccaacacagagttaagcaagccacttacctcggctgttctaatcaaccaataatcacactctttccacgagtatccgacgccgggtggcccaaatctattcaattcgattgcatattgtaaatatcatttcaagaaatcaaagtaactaattaattcgaagctaatacgcgaaattaggaattttgaccaaaacgcccctcaggcccatgtctcggtattgggtaaaagttatattttacggacacccattcactcacgagtctaaccatacgaaaaactctcaaatcggaggtcaaatacccaatcaaaagcccaaaatttggtctaagaagtttcttccattttccccaaatttctactcaaaatctcgaaattaaaggtagaaattaagattagattcatggaaattggtctatataggttaggaatcacttacccaaagtacccaggtgcaaaagtctccaagaatcgtccttcccgaactccaaaattcgaaaatggtgaaaaataacttaaccctcggaattgggtctttaaaagtctgcccagggctttcgcacctgcgaaaattacatcgcaggtgcggaaatcactaaaggcacctggggccgcacctgcgatcgattggccgcacctgcggaacccaggtcgtacctgcaactactggccaccccactcacaatcgcacttgcgaccaggcctaccgcacctgcatgtccgcacctgcaaaaaagccatcgcaggtgcgagacaccagaaacaggtctggttcaacaattgatcaaagttccaaactctcccgttgggcatccgaaataaccccgaggcccccgggacctcaaccaaacttaccaactgacccaaatacattattcaaacttggtcgggccttaaaaacacatcccataacatcaaaatcatcaattatgcatatattcaagcctaagaacttaggaattttcaagaattcacattcgacgccgaaacaggtctaaaattatccgaatgacctcaaattttgcacacaggtcacaaatgacattctgaacatgatgtcgctctcggaatttcattccgagtccgatatcaaaatctcgcctatcggccgaaattgccgaaagtctaactttcgccaatttaagccttaatctacattcgacctagaaaacatattccgaacatgctcctaaccccgaaatcacccaacggagctaacggagttgacggaattccattccggatccgtcttcacatagctctagctacagctcaatttctaaagttaaattcacctcagatgactatgtgtccaaaatcactccaactttcatcactcaacgctccaacacgttccattaacataataagacatggtagaagcagttattaggggatcagagcgctaactctcaaaatgaccgaacgggtcgttacattctccccctcttaagaaaatcgttcgtcctcgaacgagaatagaaacatacctgaagttgtgaatagatgagggtactgactccgcatgtcctgctccatcttccaagtcgcctcctcgaccggatgacccctccactgcactttgactaaggaaatatccttcgacctgagctttctgacctgcctatctaatatagacacaggctcctcaacatatgctaggtccttgtccaattggaatgagctgaaacccaaaacatgagtcgggtcaccgtgatacttcctgagcatggaaacgtggaataccggatgaactcttgctatgttaggaggcaaggccaactcataagcaacctccccaacccgctggaacacctcaaaaggctcaatgaacctcggactcagcttacccttcttcccgaatctcatgatgcctttcatatgcgatacccgaagcaaaattcgatcaccagtcataaatgccaagtcacgaactcttcggtccgcataactcttctgcctagactgagcggcgcgaagtctctcctgaatcaccttcaccttgtccagggcatcctggaccaaatctgtacccaacaatcgggcctcgcccggctcaaaccatcctactggggacctgcaccgcctaccatataaagccttaaatggtgcaatctgaatactggactggtagctgttattataggcaaactctgtaagaggaaagtactgatcccatgatcctctaaaatccatcacacaggcacggagcatatcctcaagaatctgaatcgtgtgctcggactgtccgtccgtctgaggatgaaatgctatgctgaggtctatctaagtacccaactcactatgcaaggctctccagaaatgcgaggttaactgaggacctccgtctgatataatagatactggtacaccgtgcaatcggactatctcctgaatgtagatctgggccaacttctcagaagaacatgtagtcaacactggagtgaagtgggctgatttggccatccggtccacaatcacccaaatagcatcatgcttcctcaaagtccgaggaagtccaaccacgaagtccatggtgatatgttcccacttccactctggaagcctaatctgctgaagtaatcctcccggtctctgatgctcacacttgacctgctgacaattgaggcatctggctacgaactccactatatccttcttcatcccccgccaccaataatgttgtctcagatcgtggtacatattcatagtaccgggatgaatggagtaccacgagctatggacctcctcaagaatcaactcccaaaatccatctacatcgggcacacaaatacggtcctgcagcctcagcacaccatcatcacctatggtcacatccctgacaccatcccgctgaactctatctcgaagagctcgaaggtcgggatcatcatactggcgttcccgaatgcggtcataaagagaagatcgagcaacaacacacgccaatacccgatgaggctcggaaagatccagtctcacaaactgactagctaaggactgaacatccaaggctaagggcctctcaactgcacgaagatatgtcaaactacccaaactctctgcacggcggctcagggcgtcggccaccacattggcctttcccgagtggtataatatagtgatgtcataatccttgagtaactccaaccacctacgttggcgcaaattgagatccttctgcctgaaaatgtgctgcaaactccgatgatccttagagaatttggcatacaacttcttctctctcaaggtatgaagcacagtcctcaagtgctgctcatggtcctcccgggactgagaatataccaggatgtcgtcaatgaatacaatgacgaaagtatcaagatacggccgaaatacgttgtgcatcaggtgcatgaaggcttcttggccattggtcagcccaaatgacataacacggaactcatagtggccatatctggtcctgaatgtagtcttcgggatatccggctcccgaatcttcaactgatgataacccgaacgaagatcaatcttggagaacaccctagcaccctgtaactggtcgaataaatcatcaatgcaaggcaatgggtacctattcttcactgtcaccttattcagctgccggtagtcgatgcacatacgcatcgaaccatcctttttcttcacaaataacaccggagcaccccaaggagatacactgggcctgatgaaacctttgtcaagcaactcctgcaactgctccttcaactcctttaactcaggaggagccatgcgatagggaggaatggaaatgggttgagtgcccggcaacaaatcaatgccaaaatcaatgtctctgtcgggcagcatacccggaagatcaactggaaaaacgtcacagtagtccctcacaactggaactgactcaattgtaggggtctcagcacttatgtctctcacataagacacgtacgcatcacaccccttcccaaccatccgccgggcctttagaaaagaaatgactcgacgtggaatatactctaaagaacctctccactctaacctcggtagtcctggcatagacagcgtcacagttttggcgtgacaattaagaatagcataatggggcgacaatcagtccatgcccaagataacatcgaaatctaccatactgagtaataataaattagccctagtctcataaccactaatagaaatcaaacatgaccgatatatgcggtccacaataagagaatctcccataggagtagaaacatatacggggaaactcaaggaatcccgagatatccccaaatgtgaggcaaaataagaagccacatatgaatatgtcaaacctgggtcaaataatactgatgcatctctatgacaaactgtcacgacccaaattcccaccctttgggccgtgactgcgcctaacgttgaacccgctaggccagccaacgtataacttgcaatagtaatttaaaatcatttaatactgaacgaaatgatggttcgtcacttttaacaaattcccaacaaaatactgtaagcattggttaataaaataacaaaactttaagaatgcggagaataaagacataacaaccatgaaataacgtaaaacttcccacactagtgactctcaaaactttgttgagccttccaaatcccttcaattgtttcacagcagagaaataataataatatcttagaaaagctcaaaatgaaatgataagacatcttcaacgaacaatcccaaaaccggggtgtcacaatcccaaggactaactactggaatactaaatacaagtctggaaatgaaaatacaacactgtcttggaaataagaagaaagacaatgaaacggtaaaggagagaagcctcgggatccacgaacgccagtgtatacctcgaagctctgacgtggactgaaggtaactccctcaaaacgctccacggggtccggtagcagggtctgcacaacacaaggaagtgcagtgtagtatcagtacaaccgaccctgagtaagtgccaagcctaacctcggccgaagtagtgaccaggctagacttgacttaaacgataacctgtcctattctacagcaggtaacaggaaataacacaaagcatgagataaaccggcaagtaggggatacaggagcagtaaaagggggacaagtggaataaaacagtcacatcgacatataggagtaatccagagaaacaatccaatataattgacaacgaaacaagataaatatcggaaaagtaaacaatggcacggcatcacccttcttgcttttactctctcctcacaatgcaatgaaatcaattatcatggcacgacatcacccttcgtgcttttactctcttcctcacaatgcaatgtacaatgaatcaatggcacggcatataccttcgtgcgtataatcaataaaatcatggcacggcatcacccttcgtgcttttactctcttcctcacaatgcaatgtacaatgaatcaatggcacggcatttaccttcgtgcgtataatcagtaaaatcatggcacggcatcacccttcgtgctttacactcttcctcactatgcaatgaaatcaagtgttatgacacggcatcacccttcgtgctttacactcttcctcaccaaacaataacagataaatggcaaggagtacagcatagtggaaaataagcaattcaaaacacccggcaagggggaaacatcaagtagtaactcaagaaatgcccggcaagggtctcagctataaccaattacctcaatcacgtactctacacttgtgttaccattcgtatcaacacttctcaaactcaatagccaatatttccaatcaataataaattaccaagtaaagacaatttcataatatattaaacatggaaggaatactgcactttctatcaaaataggctcacgggcatgcttgacacacatggcataggtactcgtcacctcacctatgcaatgaacatgatattcacctagcacatagcaaataatacatattccctcaccaaagttaggcaagacacttacctcgggtccaaaatatagcaatcaaccctctaagaccgcttttacttttgaattcaactccggaaccacaatatctaagcataattaatttaagtgtatcaataataactcaataataccatcccatagcctaaatacacaattcccacctttctttcaaaatttccaaaattcgatcccgggcccacgtggtctaaactcgaggttctgaccaaaacccgttcacccataatcccacgagttcaaatatatgattagttttaagattcgaccccaaattgaggttgaatcacccaattttcccaaaaacctaacactacccaaaaacccaatttctcactttgatttcatgtttttaggcctagaatctagtgattaatgatggaaaatggaagaagacgatgtagaaaatacttacccacgagactatggaggaagaattggctgtgttctgtttttggactttctaaataactgggcgaaaatgtacattgcgatcgcgggaaaggggttgcgatcgcagagtttgaagttgtgctactatgcgatcgcagaaggggaaatgcgatcgcggaagggaacggaccaggcgtctgcgatcgcagacgaagcaatgcgattgcagagagatactacccagcccccacctgactccactgacacgctatgcgatcgtagaaagaggaatgcgatcgcggagagcatctgggcataattctgcgatcgcggaggcaaacttgcgatcgcagagaacaacaaattgtttcccccaattaagcctatgcgatcgcgaatcaatagctgcgatcgcagtgaaggaaacaccagacaccagaaacctgcaacaacacaccagaatttctaatttttttacacttcgttagttacccgaaactcaccagagccctcgggtctcaaaaccaaaaagacacacgtctcccaatacatcctacggacttgttcaagcttttaaatcatcaaaatatcatcaaaaacacgtaattaaacctcaaaactcttagaaatttcttaaacttcataaacttctaaatttcccatttttaatcagaatcacgtcatttcaagtctgttttataccaaatttcacagataagtcacataacatataataaacctgttccgggctccggaaccataatacgggcccgacaacacggttttcacataattattcattttcaaaatcctttatatttttcagaaaacaattttctttaaaaattcttttctcgggcttgggacctcagaattcaattccgagcatatgcccaagtcccatattttcctacggaccctccgggaccgtcgaatcacgggtccgggtccgtttaccagaaatgttgaccaaagtcaactatattcatttattaattatcaaaactcagtttttatcagattttcacataatagcttcccggctacacgtccgggctgcgcacgcatatcgaggtgagactaacgaaggctctcggagcctcggaacacatatacagcttaaattatataagatgaccttttgggtcatcacacaaacggggacaatacctgtgataactgaatctgaagcaatggcctcggatctggctggaagagcataatatatggcctggcctccctctctagggcaacctcgacctccccggccaccccgacctccacctcgagctgcctgagatggtggggtagcagctggggcttgaagtatagctggaggacctggtgggagatgtggaacctgataagtctccggtggtgcacccctcctaactctggggcaatccctgacctggtgacgagggtcaccacacccaaaacaaccattctgagggcgtggctgctgccgctgactgtgaactggcctgctggactggccggtgatagcacctcgagcaggaggcacctgagatactggtggtgcataataaggctcccgagatctaggaggagctggaataccactagctgctggaagagctgaatgaacagggcgactcacaaagcccctaccatagcatgctgctggtgcacgagcgcttgaaaagtgaccagtctctcgaggcctcttggcctctctctcctctctgtcccgggccaacatacttttaattctccgggcaatactcactgcctgctgataagtaacgtctatctctagatctctggccatactagtctgaatgttgggatggatcccctcaataaagcgtcgaactctctctctgacagtagaaaccaaaactggggcatggcgtgccaagtcacttaaacggactgcatactctgacacagtcatagtaccctggcgtagctgctcaaactctgcatgccaagcatccctgagagtctgagggacgaactcatgtagaaacatctctaaaacctgagcctaagtcagtgaagctgcctcggccggactgctaagctcaaaagcacaccaccactagtaagttgctccccttagctagaaagcagtgaatgagaccccactcgtatccacgatacccatagtgcggagaatgcgatcacactcctcaagaaaacccagagcatcatctgaagctaatccgctaaactcaggtgggtggtacttcttgtacctctcaggaggcgctgctcagactccgatgcagctgctctggcctcatgctgaactggagctgctggaggcatagggatatatctggaacctgcctcatatgaacctttttctcatgagtacgggttgcgggagtctgtgcccctcccccggcctgggatgtagttggggctatcagaagtaatcccgcctgagacagagtactgaaggcactaaagaactgagctaaggtctcctggagggttggagtaatagcaggaacctccggtgcccctccagctgtagttgttgggggatcctctgcctctgctctggccggtgctcgggctgcaccacgtgctcgttctcttccccggctcctgcctttggtggctctggctgagggctcgggtgcctggttatcaatacgtacggtacgagtacgaaccatctctgagcaagaatagaatagagtttaagagttttgatgacagtaactagcacgataaggaattccaagaagtatgattgtgcttaacagttacatagcctctcgaagataaatacggacgtctctgcaccgatccgtgagactataataaaccggcttgtgacattgtgactcctgtgaacctagacgctctgataccaacttgtcacaacccaaatttccctccacagggtcacgtgacggcacatagtctctacgactaggtaagcctaaaacatacggaaaagtaaatcggaaacagggataaaacattaaagataaaaacagtagccataaagcttaagccgctcggcatttacaatttagctcttcccaaagcccggactatcacaactgtcacaggcataacactatagctcaatacatcgaaactgagagtatttctgcctaagtaccgcgactatactaagataagagagggactaggaaggcgctgctgacgcggcagaaatatctctaagtctcccaaagactgatgatgctgctaatctaggtactgcgtacaggtacctggatctgcacatggggaaaacatgcgcagaagggcgtgagtactccacattcagtacccagtaagtgccgagcctaaccccagtcaagtagtgacgagatcagggtgaggctctactaagtttataaatagacagttataatctaacagttgaaataagcagcaataatttacggaagtttaaagtaaaaactagaagagaatgatgtaaatagctctccgctcagcatagcatataacgcaataaatactcgtgcaatgcaatacgggggaaagatcgcaggtctcggcctgcagtcccactgtaaatatgctatgaaatacaggggaaagatcacatgtctcgccccgcagtcccactgtaaatatgttatgaaatacagggaaagatcacaggtctcggcctgtagtcccactgtaaatatgctatgaaatacaagggaaagatcacaggtctcggaccacagtcccactgtaaatatgctatgaaatacaagggaaagatcacatgtctcggcccgcagtcctactataaatatgcaatgcgagatgtataccggatgtagcgtaattcaaaagtttaggaaaaactgttggcaaaaatagagtaaaatacttcaacgatgttcaaatagtagtaatgagtggaaaaatcaagtaaaatcggttggtaggtttaaagcttaagttgccactcagtctagttcagtaatagtaatatttggagtgaaaatgagatatggcatagtaagaacgatggaaattcggtgagaataacccatgcatgcaccgtcacctcacgtacacgtggttttttttatagtaaagatcagttaaaatgcctaagggaaattccccaacatagggttaggcaagccacttacctcaactgtgctaattaactaataatcacgctcttgccgcgagtatctgatgccgggtgacccaaatctattcaattcgattgcatattataaatatcatttcaagaaatcaaagtaactaattaattcgaaactaatacgcgaaattaggaattttgactaaaacgcccctggggcccacgtctcggaatcgggtaaaagttatattttccggacacccgttcactcacgagtctaaccatacgaaaaactctcaaatcggaggtcaaatacccaatcaaaagcccaaaatttggtctaagacgttttatccatttttcccaaatttctactcaaaatctcgaaatcaaaggtagaaattaagattagattcatggaaattggtctatataggttaggaatcacttacccaaagtacgcaggtgcaaaagtctccaaacatcgtccttcccgagctccaaaatttgaaaatggtgaaatataacttaaccctcggaattgggtctttaaaagcctgcccagggctttcgcacctgcggcttctaggatcgcacctgcggaaattacatcgcaggtgtggaaatcactaaaggcacctggggacgcacctgcagtcgattggtcgcacctacggtaccgcacctgcggaacccaggtcgcacctgcgaccactggccaccccactcacaacctcacctacgactaggcctactgcacctgtatgtccgcacgtgcagaaaaaccatcgcaggtgcgagacaccagaaacaggtctggttcagcaattgatcaaagttccaaactctctcgttgggcatccgaaacaaccccgaggcccccgagacctcaaacaaacttaccaactgacccaaataccttattcaaacttggtcgggccttaaaaacacatcccataatgtcgaaatcatcaattatgcatagattcaagcctaagaacttaggaattttcaagaattcacattcgatgccaaaacacgtctaaaattatccgaatggcctcaaattttgcacacaggtcacaaatgacatttcggacctgctgtcgctctcggaattcgatttcgagtccgatatcaaaatctcgcctatcggccgaaatctccgaaagtctaacttttgccaattcaagcctaaatctacatccgaccttgaaaacatattccgaacatgctcctaacctgaaaatcacccaatggagctaacggagtcaacaaaattccattccgggtctgtcttcacacagctctagctacggctcaatttctaaagttaaattcaccttagaggactatgtgtccaaaatcactccaactttcatcactcaacgctccaacacgttccattaacataataagatatgggagaagcagttattaggggatcgggatgctaactctcaaaacgaccgaccgggtcgtttcaactcatttccttttaggaaaggactatagaaattgaagtgtcgccacctaacggattaaaggtgcgttagggcacctaatgcaagtaactcatataaactgatttgcgttaccagagactgggtaagggcttgaatataccttgaggggaaggtattaggcacccctcaaggtccacaacggtgggtcctgaccaaacttattttgtgaattaatagtcattaaaaaaataaagcaatttgagcacacatatggattaaacaagaaaaagggaggtcctgggtttattagcctataggatcacatatgtgtaatacccggtaaactttcctcaatgagaggtgttacacgtggcattatcgcacatgtcatcatattatttactacccaattgccctccccttggtggttatataagcgattctaattaaacgtactctatgcatgcattaccaatcccttccttatggccctggaggtgtttaggacctctaatttaggcagttatagactctcctaaggtgcttaaaaggagaaaatctaagcgacagtaaaaataattaggactgtcaggcaaaggaacaattaagggggctcacatttacctcctcaaataagcaaacaatagcacgtctcaaacaacaagattttagatatttcataaggtcctagagcaggatatctaagtgagcaaacaaaatatatgtagcattgtgttaaagcgaggcaatagagacctaatcagtttgcctactgatttttgtgcttgctgaatctggcaattcaaaaataattaaacaaagcacaattttacaatttgcaagattttaattacctacaggattgcctaggcgtggatctgagatgtcccataacatgatatctaattgttaaccagagtcctattaaacgatttttaaacaagcagtttgttcacgtcctaaaggcatgctatctaggtgttgatcattacaaaactggttttatacacatttatctctataacatgatatctaggtgtcggggccacttttaaacttactcttattgacatggtagttactgattttatacgatgtaggcgtggtattaaagtgaatgcaatagaagtcctaaagcatggtttctaatgcacatgaaaggatgatcatgattattaggcatagttgatagcaacctaatgacaggatttctaaacagacatgaggtatgcagaagttagaaagcagaattttagaacaaatgatataatgcacctataaacatgttttctagtatgacaagcaatcctaagagcatggtttctaatgcaagaaaatagtcataataatcataaaaacatgatttctaatgcaagcaaagaatcataataatcccaagggcatgatttatacccggtttttccacaaaatcatatgaaaatccctccctttttactagtatccccaatatctgtttacaagaattattattacagaccataaatgaattgcaataaataaatattgttatactatagggagcctgaataggcccaaagtgaacctggaggaaccaggccttcaaacagtccaaagtaccacatctcatagtgtccaagagagagtatcctggtgtgtcaaagttcccaagggcctcagggaccccgagcaatgctcacaccaagaaaagaggattaatctttgtgcactatggaagggtcagccccagtgtgctagagttcgaaggaatctcatggattcctaggcagtacacacactatagggcaagaatcctatgtattctaagagtgagagtgagagtgcttgacggagtaggaataaatttaggaaaacataccagaagtagaatagttcaaaagtgaaaatacattaggaatggaaatagtttagaaaacatattaacagtgaaaacagtttgaaaacattctaagaaaagaaaagttcaacaaacagcagcaagtaggaacactatcacaaagcttcatattgcccagattcaattcagttagtaaattaactctaggtgaccatgtggcatgctgagacaatcagttacacaaataggagccggggttgggaacacatgaagtctgaatcaggagcacataggaagaaggtgatagggaagcatgctagttaatagagacatatagcaggtaaaggtatattaacattctacaatagccaagttcacaacaacatactgacttagagtctagacaggaacaacgtaggtctaaatgctaaagtagttatgttaactagcagcaatagacagtaaaagcatagaaactaagtgtagtaatagtcatgctagagaggacatgggtttaactacatagagttggtcgtgtcaattgaaattaataagacaagataggagtctgagacataaaataagcatgctgttgaaggtagtaaactagaaagattgaaatactcaaattgaagtaaacatactgattaaagcaataaacaagaaagagtgaaacttaaacatgctgatcaaagcagtaaacagagttactatgcagtagttacattagtgtagaagagacaaggccttaacagaagtgaagcaacatagagcacacagatttgaacttcatagtataatgaatgacattaggagtagaaacatactagttaaggaagcaaaaaacagaaggtaatgtaggcaggattcaacagtctagccttggctttcagtcggctagacgagcaatgaacacaagtagcagagagatgagagtaaagttttgtgtgtgtgtgtttgaactgttgttcgtcctttgaagaggtagaatgggggtgtatatatagcacttagggagtaaaacaaataaggtaaaggaaataacagttcaatcaattggagtcaatcagtcaattatggaatcaattccactagagaaatacagaaaatacccatttaattgggggagtcaattaacggtcagaactgggtttaattaaggcagcaaatcagaatcatatcatatagggagtcagtaaaatcccaaagcatactgataattaattaaggcaaatataatcaattaaggtcgtgaataaggaaacaagtaagaatctcagcaaatactgattttaacaggaaagaattattcaaattccctaattagaaatcaattaagtaaaatctcacagaacactggattcaacatgaaaactggttcaaatcctatatagaaatcaattaagaaaaaaatcccaaaaaatattggatttaacaagaaaatcattcaaatccctaaatagaatcagttaataagactggttcacagaaataaacataataacggaaaaaaaattgcagaaatcaatataacaaacagaaacatctagggttgaagaatatacatgagaatcagtcaagatagtgaagaactcttagtttaaacactgaaaagttaggaaaacctttgaagaaaagtctgggacgaaccctaatttcagaaagagtgaataaaatcgaagcaattaactagaataaaagattttcaaaggaaaacacccaataatactcgaatcatttcagatctacaaagatttgaacagattcaaagactagcgaaactagggttttcagaaacagttaaggtaaaagaaaatcggtaaaaaactatggattcgcactaaaaataagaggaaacctatactcacaaatgagaaaggccacaaacagccctatagacaaattttggcaagaaccaggttgaatctccatgagattatctcaaggatctttgtaatcaaatagccagggggtataggaggctagtagtggtccgggaatgcacgaaaactccatagatgggagctattcgccggcgacaacgattagggttaggggtgcgttgagagagaattggagaggttaaggaaccaatgacggaggaaatgaaagagtgagggggggggttgtttgtgaattaaaaaggtaagttttatcgtggatcggtaatctaaaagatcaacagccacgattaaacaggattattggatcgggcaggtatacgttgggcttagggtgaatttgactggtattattaaggggtttgggctggtattaaaagggttaggcctgaaaaaattagagaaataaaaagggttatttgttaaatacccaaataattgaaaaaataatttataaaataattaacagattataaaaaatgatttgcatgcatagaaatgttttaaaataattactcaatattttaaaaaatacaactattttctggtaaaataatgtaataatgctcacacatgggctataattgcaaagttattgcaattataacctaaattttaaatgtggctatttgtgaaataattaaagcttagtataaatataaatagcaaaagtaaatcataaaattaatacaaaattatttgtagtgcagttaatgattatttatataataaaatattgggataaattaataaaacatccttaaaaatgcaaaaaatatggaaaaaatattaattgatgctaatgcatagttttgaaagtatgtatgcattttaaaaaatattatagggaaaagttgggtatcaacaatgagaaattgaagtatttatacgaatcgtttaagcatgatcgaggagtggaaaggtcgaaaaataacggtcgtgggcttttcgagaatcgtgctgacggctaccactgtgcacccttctttcaaagcaatcaatgatctcacgtggctgacgtcataatggggatatcgaagaggcaagaattcaaggtcgtttcttatcatttcattctaagaaactgtgatgacccaaaaggtcatcccgtgttttatgagtcaaatctatgttccggggtcacgaaaacctccttttatctcaccttgattttcgtgcgcagcccgggcgtatagcccggaagacttatgtgaaaaactgagaaaaatgatagttttgttgttgaaatttgatttaagttgaccttggtcaacatttttggtaaacggacacggacccgtgttttgacggtcccggaggatccgtaggaaaatatgagacttggatgtatgtccggaatcgaattccgagggcccaagcccgagaaatgaatttttgaaagaacttgtttttctgaaaatataaaggaattcagaaatttgattatgcttggaatatatggtatcgggaccgtattttggtttcggagcctggtacaggttcaatatgatatttatgacatgtctgtaaaatttggtaagaaacggaagtcgtttgacgtgattcagacccgtagttgtaaagtttgatattttggaagttttggaaattttctttgattttgatactaaattcgttgtttaaggtattattttggcgatttgatcgtgcgagtaagtccgtaggattcttttgaggttgtgtgcatatttggtttggagccccgagggatcgggtgagttacggataagtgtcggactaactaataaaaagcctaggaccggaagtgatcttagaaaccaatcgcgttccgggaaaaaatctcaatatcgtattcgtctagaagaaaaacaaaaattgcgttttcattatggtcttacagaacgacaattacttaaatacgttcgtatcgccagaaaagccaaggggtcaacaggtcaagttttactacaattacttgaaatgcgtttggataacatcctttttcgattgggtatggcttcaactattcccgcagcccgtcaattagttaaccatcgacatattttagttaatggtcgtatagtagatataccgagttatcgctgcaaaccccgagatattattacggcaaaggatgaacaaaaatccagagctctgattcaaatttctctcgattcatggagtgtttttaaacttaaatatctggtgtttggtcagttttctggtgtctgagcctttgtgctatgcgaacgcatgaaaagtcatgcgaacacaatgcacatgcggggagggggactgggtagtagtgtgcgaacgcatggcacagggtgcgaacgcggagcataggaatattactctaacgcacccatgtagccgcgaacgcgtagagcattgtgggatatgggggttgggtagttttaattcaatgtgaacgcatccatgggaatgcgaacgcaaagggtaagaaaagggaaactatgcgaacgcacctaggtggttgcgaacgcatagctttagagaggggctgggggctgggcagtgttaagcttatgcgaacatatcacttaggaagcgatcgcgaagggttaagggaggggatcctgtgcgatcgcaccactcaggtcgcgaacgcataggctattttccccagttattttaaaaacagtagccattacgggatttttaccaaaactcataacttcttcatctaaactccaacttgggtgatttttgaaagggaacttcactacaaaatcataggtatgtattcttagacttgttttctttaatttccattaataccaattagatttctaggcctaaatcgtgttcttaagggtagaaaattagggaattgggtagagttaggccttcttgaataattggaatttagacctcgttttggggtcggatttcgaaactaattacatattcgggctcgtagggtgaatggatgatcgggttttggtccgaacctcgtgttttgaccaagcaggcccggggtcgatttttgactttttgggaagaatgttgtgaaacctataattaagcattggaattgaattgtttagcgtttattgatgttattaagtcaattatgtctagatacaattgatttggagtcaaattcaaaaggaaaagcggtgattgaggcttgattttggtcgtggaagtcgaggtaagtgtttggcctaactttagcttgagggaataagtattgagtcttatttgctatgtgtttataccatgttcaacgtgtaggtgaggtgacgagtacctatacgcgagtcggatattatgaattttgtggttttcattgatatttactgtgttataccttgaatttcactttgtggttgttcgttttggtggaaattcttggtaatgaacattatcgagtattagtttcggttgagaaatcttatgtaagatatgtacttgagtgagattggttatagttgtgtcccttgtcgggacggtgatatttttactgttgttcccttgtcgggatattgtgatttattgacatggttcatattgttgatctttacttgccaaacctctattattgatattgtttgggtgaggaagagtgtaaagcacgaagggtgatgccgtgtattgattattgtgaggaagagtgtaaagcacgaagggtgatgtcgtgtcatgttatgatattaaagcatgaagggtgatgtcgtgccgtttctatttattatttggtgaggatgagagtaaaagcactaagggtgatgccgtgcacttgatttattatttggtgaggatgagagtaaaagcacgaagagtgatgtcgtgcaccgtttcctctatgttgttatttcttgttgttgacttgatatttgaactgttgtcttatttctttatttctgttatctgatatttctttccccggcatgtttcccctttttccttgtacttaactggttattcttgttgttgttatttcttccgaatattatttaattgcacatattgtcttgattgccgtgtcctagcctcgtcactacttcgccgaggttaggctcgacacttactcagtactcggggtcggttgtaatgatgctacactctgcacatctttgttgtgcagatcccgatacaggaccctttggacattagagcgaggaggctgtcttcagtccacgtggagacaccgaggtagtcttgttagcgtccgcaagccttggcgtcccctcctatttcctttgtattttgttctagttgtttcagaaacagatgtacttagtgcattcagacttttatgtgtattactcttacacagtccgtgagttgtgactccaatattctgggatttgattagttttttgtgaagtttcgtaaaggcactgtatggaattatatatatcttgcttcatcttatattattattcatgttaatgtagtagttcacatgtttacgactattaataaaggaataaggtaaattgaacattcacgttggcttgactagcgggttcaacgttaggcgccatcacggtcccgacggtgggaagttcgggtcgtgacagaaacatggggactattagtatacggctaaaatcagagagtccgactttgagtccactatggcattttgtgcccaacctcgagaagctcgaagcaaagtcgaagcttgacaccgagggagcatatcgaaggttccctatgctcgacctcggggaagtataaatcgatgaccatcatggaaaggcgggaaatttctaagggcacgtggttagagctgaccaagtctgcaagaatagtacaagtccgtaccaagccattaaatagctgtaccatctacatttctttgtaatagttacacatatattatgttgggattccccctcctatataaaggggacccttgttattttttgggattcatgaatattcaatacaacaaaaacattctctgcttccttaacatactcagcatttgttcgacagatttattgttttccatttattgtgttcattagttgttcttcatttgttgctcattattgatcataaaagttctcgagaccctccatattgttattccttcatcgaccgtcccctattaagcattctagctcgacctcgtggccctgtttcggccagatcgagaccctgtctcacaacagcttggtttgcatatcctacttttccttactcttaacttattttcttaactcacacttagcatctattgcctaacaacttgtattaaaataaatcacatgtttttagaactacaaaatcaaatataattgttattaccatttttaagataaataaaattttagttcaaaaattttccatagttggaaaacttacctccgggcagttcctcctgctatttgtatcttacggggcccgcgtatgagttgagatttccataaatctcagagcaatatcttccgctttccgctacttcccccaacttttttctactttttctagagtttaagcaactctccactatctctaccgttgacctccattgatttttcaaagcactatgttgtagtattcaaatagtacatttcagcatatatatttgaagaaactctgtatatccctcctttttcatataactggcatttgcacagtgcgtcttttaacttcccatggctttattaacttctcgtactaagagaaaaaaatcgttaccatggacttgtctaataccttgtgtaatcctgctttccgctgctttctttataggaagcgccttcattgtcactgaatgtaaagaggtaattaattaaggcagatattactcttcccttcattccgtaattcagataactcgcattttttgttttcacacgcttattcttcgtacagaaaattttaggatggcaattgattgaatccctcaaaatgactaagcctacaatgtgtgaggtttgtctagctatcaaatcagatcatctcttttccttgttttttttttccggaaacaaaaaccttggttgtagaaaaatgtgtattatgcaaaatatttgtcgtttttaattgtgttataggatgagtgcaggcctgaaggaagcgagacactgcccagaggtattgtggctaagacctctgatttagagatgcatccgctttggggtccccccaataaaaaggtatgtaattattccttttgtgaacagattttaatgatggccttaaactttaagaggcaatgttctttttcccttgtagaaatcaaaatcgccaatgagcttactagctatggcagttggaattaagcagaaacagaatgtcaatgaaattgttaagaaggtgagagacaataatttatccgcacttgcacaattctcatcccagcctttgactaaaatagcttgtctatatgtctcatatgcagtttccagaggctgattttgtcattatgctttttcattatgatggtatcgtggatgaatggaaagatctagaatggtgtagcactgctattcacatttctgctattaatcaaactaaatggtatgacttcttctatcctaagtcacactggtcttaatcttttaattgctagtcctataattgttacaactaagacaatgtgtcggtcaaaagcattagctgactctttattctcttgttatcttaggtggtttgccaagaggttcttacacccagatattgttgcagagtatgcttatatattcctgtgggatgaagatcttggagttgaaaacttcaatgctggacggtaattatccctgatataggactaaacctataaaagatgcaatctatcttccaaattgcatactactattaatttgtagtagtatgacttcaatgagctctaaaaggcaacccctcttttctgttagaaggtaactagcattgatgttacactatctttactgcagatatttgtcaatagtaaaagaagagggtcttcagatatcacagccagcaattgatgcagatatatcagaaattcatcaccaaattacagcacgagaaaaggggtcaagagtgcataggtattactctctattccgagcctgctgaaggctgtcataaggttcatgatcagtgacagattcatcagtaataagttgatcttcttgaatcgccgtagagtaaatattgctaactctaaaaactcttatggttgaaataggagggcagtaaacataaagggtccaggaaggaggtgctacgaagacagtactgaacctccatgcactgggtaaaattattaccagttataggctgaaagaactatgtttcaattatatcttttctatccatctctaaatcctagatttctaagagaaaagtaatgcacttgcaggtgggtggaaatgatggctcctgttttctcaagggcatcctggcgttgtgcgtggtacataattcaggtatggtttcagatcttagtaaatctagtactctaactgtatagccaagcttcttgcctaagtttgaccttccctctgcttatagaatgacttcgttcatgcatggggagtggactttcagcttggatattgtgcacaggtttcatatcccagcaccagcaattatttctctttaaaagttattgtctagtgccttcattttgtcaattcagaaaaatctaatttcttgtttgatatgttactatttttaggggaatagaaccacaaacgtcggggttgtggactcagaatatttggttcactatggtcttccgacactaggtggtgcagaaaatgaggtatctctggcaaaataaagaggattgaacttacacaggataattgaataggaaaagtgtctatcccctcttttttcagtaaattctaactattgtctttctattcagaagagtagtttagcacaagagcaaactcttaaacaggaaagcttgtcgaatgaagggcaaacagtatgtaccaaaagtaactagctttcaacaatcaactgcttgaatagcatgaaattaattgaaatataattgcagggactgccggaatcccatccatctgatgcaagaaatgctgtaagttccattatcttctataaaagaacctctagttgatagccattaccattcattcatatcttagtgtatctacaccacatacacaatgcaatatcacactcttctaatgttgaattgcatataaagctaaacacacaactaattagtatctccaagttcctttccatgttatgataaaaccacattttgcaggtgcgaaaacaatctcttgttgaattagagagattcaagaatagatggaaaaaagctgtcagagaagaccaatgttgggtcgatccctttcagcagcctgtgaaacaaaaaaggtgactgaagggttgcatcgtcaaacttaagactgaagaagatatacaaattacagttattccatcttgaagttgaatttgaaggctgataagattctttatggacttcaagtgctcatgataacagaggcacattatcaatttccataagctccaattatgtttagaaacaaatagaatagttcagagttcagacagccagattaacttatgatatacaccttgcagttcattctctctctgaagcaattactgaaaatacaacaccgtcgagcagcttaaatgaaaatcttaccagtttctggtgttatctatgcagcatgcaagcatcacatattaagtatacatcatgttgtacaaataataaacacgctgaaatataaatataaatattatgacaatcacaaaatgctgcttctttttccaacaattccagcaagaagttgacctaattcttcaccattgtcctcctgaacatgatgtcccgactgcataatccagagaatagataagatttttgattacaaaccaaaaccacattggcatacaggaaagatagtgtaacgacccagccggtcgttttgtgtgttgggactctgttcccgtgaatgactcttcctatagcgactactcgtgccttatgacttgtgtgggccggtcgttcgagattcggaagtgttttggccagttcaggaacacttggttcctgaaggctagccctatttggctgattttggttccgagcagcattttgagcaaacgacctcggaatcgagttctgacagctccagcagctccggatgatgatttcggacttgggagtgtgttcgcctcgggtttctgatgacccgggagtatttcggcacctgaattggaattcagaatttcatgtgatttggaattcagcctggaattggacctcgttatatcatggtccgaatggaattccagaactggcaatagctccgtacagtcatttatgacttgtccgcaaaatttggggtcattccgagcagtgtagaccgttcggcgtattgatgagccgttgaaatttttcttgaaatcctaagtttgatctaagtggttttggagagtgattcttggtttgaatgatgtttctagtgttctgagagctcgagcaagtccgtcatatgattgggacttgttggtataatttgtcgagggctcgggtgggcctaggggtctcccggaccccgaccggggtcaaaagccagcaattgaactgctggtgggaatttactggtgtgaccgcacctgcggtccatgagccgcaggcgcgaggttcgcaccagcggaattccctgcgcaggtgcggctccttccgcaggagcgaccttctttccgcaggcgcggctccgcaggagcggacaaaggtccgcaggcgcgaactttcccaggggcccaggccatcgttggagcggcctattctccgcaggcgcggacaaaagcccgcaggcgcgagaaatttgcccagtgccagtccattttccgcaggcgcgacccaatttccgcaggtgcgagtccgcacctgcgatccaaaagtcgcaggtgcggaaactgctgggcagttccatttaaaaggccaagtcgcgaattcatttcctaaaatcacatttcttccattgttgacgaccccaagagctccagaacagatattttggcctaggaactcaggtaagtgattccgtaaccctccgcatataatttcttccgttctttgagaatttcctcttcctaattcatggaaattcataagattttgtttggggaagaaagaggggtttgataatattatgaattttaatttttgggccattgaggaatgattaatggagttaatcttgatccttaggcgacgtataacgcgtttcttcaagaattataattttccgaagccgaagctcggagttgaatttccaaagtacgtcaagaatacgtttttatggaaatagttgataaatcctcctcaaatcttcctaaattgatataattatgtgcttttggctagttgcgagccatcgagggtgattcggaggattcgtgcgtcgtgttgatcggtccgttggccggaggagcacttgtccaggtgagtctcctttccaaactttgtaagggggaaatgtcccctaggctcttgattgctaattgtgctcgttgaggggggctacatacgtaccacatgacgagagtccgtacgtggcatctatactgtatgttgggtagccgtaggacccacgaacatgttctaattgttgtttgatattatctgatgtttagtacaagttattactgatatttgttgaaattgagctatgatagctgcggatttaatgtacacaatattcagataagaattatgaactccaccaattgagtaattgtgttactcctatataattgataaagagcaaataataaacgaataatgagttgttgagctaaatgaaggtggttaaaattccttctcgtacttgaattgctcgatcatggtaatattttgagcaaagaggataatatgatgaaaatcctaactttggctatcaagtgaggtgtgagtatccgatcccgttaagtgtgggcgagtcggtaccacggtgtctacatatacacatatatatatacattcatgcagtcgcatacacgcattcatggcccccgagtcacaggtttgattcgtgatcggggagaacttatatttttattgcccctaagtcacatgttgattcgtgatcaaggagaatttcacttatgttttacttgccctgagtcacaggttgattcgtgatcagggagaattatactactattttcatcagcccccgagtcacaggcatgattcgtgatcggggagagttttactttgcatagtgagcacacgagtcgcaggtatgattcgcgatcgtggggagcttatcattatcgagtcagcacacgagtcgcaggtatgattcgcgatcgtggggagcttatcattatcgagtcagcacacgagtcgcaggtatgattcgcgatcgtggggagcttatcactatcgagtcaacgcacgggtcgcatgtatgattcgcgaacgtgtggagctttatgaccgagtcagtccttatgacccacccttatgacatcggccgatagtcttgtccgtgtcggttatatatatatatatatatatatatatatatatatatatatacgcattgcattcatccgcatttgcattgagttgggatcgtacgagggtgagttgagaaacaatacagagtactggcaaatgaacaattgagaataaagaatagtcatttcgaataatgaggaagagaacaagtaataaaactatgaatagtttacaaaaggagactatgtttgagatcagttattgattgttgctcacatgttcttatacttgatgtactagctcacatgattcattgctcagcatgtattttatttcattatgtactggaccttagtgagtatgtattctacctctcgtcactactctttacgagtttagacgggatactcactgggtacatatttgtttatatgtactcatgctgcactttccttctttttctgcacttgactgtgcaggtattgaggctggtccgtctggtcgtccgcttgttgatagaactgaccgcttcgtcgctccacacggtgagctgtcttcttggcgttctcctgacagcacctccggagccttctagtttccttttgctcagtcttttgttcaagactgcggcttgtatattttgtatatgtattttctacagttgtatctatgtagccgcccgttgacattgtgacactagtcctggcacacacttgttgtagttatcggggttgtatatgtatcgggcctagctgtagttcagcttgtttctacggccttgccccatgttgttattgtattccgcactttcattgttattattgttcgttggcttgcctgacctcgccgttaggcgccatcacgacctggaccggttttgggtcgtgacagagtggtattagagcgcttaggttcacatagtctcacaagtcacgggcaaactcagtagagtcctgcggatcggtacggagacgtctgtacttatcttcgggaggctatagagtgttaggaaactccttttgttcagaatctatcaggcagttggccttatactcaatttgttcttctattctctcacagatggtgaggacacgtgctttccatgatcccaattcgggggaggctgctacccctgccgctcgagggcgaggtctaggcactcggggtagggctcctgccggtaggagggggcgagggcgtcccagagctacaccagctgcactagtggatgatcagtatgttgatgagcaggaggagctgcctccagtagcaccacctctagtggactttatgacggcaccaggcttccaggaagtcatgggccgcatgctgagattcatggacacgatgtcgcaggcatgcatccttccatcggatactgccacctctcaggcaggagggggagttcagacccctacaactcatactacaggaccacagcgtactccagatattccgccgggtgttagggctcagcctgggctagaggcaacaggatccaggccagttccgagaggggatcaacataagtaattgggtagatggacacagctacaccctccggtcttcgggggtgagcagggagaggatgcccaggattttctagagaggtgcagggacagactgcacaacatgggtatattggagtctcacggagttgatttcacttccttccagtttcagggcagagctcgtcgttggtggcagtcgtatttgctgggcaggccagccggttctccgccggtcacttgggatcagttttccctgttattcctggataggtacattcctccatctgagagggaagacttgcgggctcagttcgagagactggaacaggggtacttgtcagtgacagattatgaggccagattctcagagctgtctcgtcatgccatcatgatactacctacagatggtgagagagttcgtcggtttgtagccggtttgcatcctggcatcaggacttctttagctagagaggtggagatgggcactctatttcagacagtggttgagatagctcgtcgtatagagggctatcgtgtcagggataggagtcagggccagtcagggtagcagggacagcaggataagagagctagattcaccggggacttcagaggtacatcaggcagggtcaggggtcagttttctagtggtcagtccagccggtcttcctatacagcacctccagtacctgctagggtagcttcagtcaggccacagttcagtgccatgccagatgtcactccagccattcagggttctcagtcctcgggtcaacaggatatgtcccaggtgaagtgttatgggtgtggagacatgggccacgtgaggagaaattgcccccatcataagggcaaggcagtgcagcagagctatcagcccagggtcctagcaccagcagctcgaccaccgaggggtgtaggtcagatttgcaggggtcgtcccaaagggggaggccagccgagtagaggtcattcagctccagctcgatctgggagagctcagccatcaggcgcctcagcacgtttttatgccatcccagccagggcagacgcagtagcctcagatgcagtgattacaggtactatttcagtctgtggtagggaggcttcagtgctattcgatccggggtccacatactcttatgtttcagctttatttgctctttctctaggtattgtatgtgagtccttgggatctcctttgtatgtgtccactcctgtgggcgactatgtggtggtagactgggtctactgggcttgtgtggttacgttctgtgattttgagaccagagccgacctattattgctcgatatgattgatttcgaggtcattttgggcatggattggctatcccctcatcatgccgtcttgaattgttatgtcaagaccgttacattagccatgcccgaatcgccgaggttagagtggagaggtgtctcagttagtgctttcaaccgagttatttctttcataaaggctcgacacatggtcgagaaagggtgtctagcctatcttacttatgtgcgggacactaccgccgaatctccttctgttgattcaatacctgtcgtccgtgagttttcagatgtgtttccctcagatcttccaggcatgcctccagaccgggatattgatttctgcattgatctagcaccagatactcagcctatatctatttctccttatcgtatggcttctaaagagctaaaggaattgaaggagcagctagaggagttattggccaagggtttcatcaagcctagtgtgtcgccttagggtgctcctgtgcttttcgtgaaaaagaaagatgggtctttgcgtatgtgtattgactatcgccaactgaataaggtaactatcaagaataagtatcctctgcctcgcattgatgatttatttgatcagcttcagggtgtgcgtgtgttctccaagattgacttgagatcggggtatcaccagttgaggattcggacttctgatgttccgaagactgcattccgcaccagatatggtcactatgagttcttgctgatgtcttttggcttgactaatgccccagcaactttcatggatttgatgaatagggtattcaggtcttacattgactcgtttgttattgttttcattgatgatattttaatttattcgcggagtttgggtgagcatgagcagcatttgagggtagtacttcagaccttgcgagagcagaaattatatgctaaattctccaagtgtgagttctggttagagtctgtagcattcttgggccatatagtatcaggtaagggtattaaggttgatccacagaagattgaggcagttcagggttggcctcgtcctacttcagctacggagatcaggagttttctgggattggcaggttattaccgtcgttttgtcgagggattttcttctattgcagccttattgactagattgacttagaagaatgccccatttcaatggtccgatgattgtgaggcgagctttcagaagctcaaatcagctttgatatcagcaccagttctttcgttaccttctgagtcaggaccctatacggtatattgcgacgcttcacgcgtcgagttgggatgtgttttgatgcaggatggcagggttattgcttatgcatcgcggcagttgaaggttcatgaaaagaactaccctgttcatgatttggaattggcagcggtcgttcatgctttgaaaatatggcgacattacctgtatggtgtatcttgtgaggtctatacggaccaccgcagtttacagtattttctcaagcagagagatcttaatttgaggcagcggaggtggctggaatatttgaaagactacgatcttaccattttatatcacccgggcaaggcaaatgtggtagcggatgctttgagcaggcgtgcagccagtatggggagtttagcctatatttcagctgaggaaaggcctctagccttggacattcagtctttggccaaccagttagtgagattagatctttcagagcctcgtcgagtcttggcacatgtggtagctcaatcttcattacttggggagatcagggctcgacagtatgatgacccgtgtctagcagaacttcgggatactgtgattaagggcctggccaaggatgttaccttaggcgaggacggtgttttgagactgtagggcaggttgtgtgttccagatgttcatggtttgagggagagaattctagcagaggctcacagttccaggtattttatccatccaggagtgacaaaaatgtatcgtgatttgaagcagcatttatggtggaggcggatgaagaaagatattgttcagtatgtagctcgatgtcttaattgccagcaagttaagtacgagcatcagcggccaggaggcttatttcaacagatgcccattcctcagtggaagtgggagcgtattaccatggacttcgtgtcaggattgcctcggattttgcggaaggttgacgcggtttgggtcattgttgatagattgaccaaatcggcgcatttccttcctgtggccactacttatactacagagaagttggctcagctctacattcgtgagatcgtcaggttgcatggtgtgccactatctatcatttcagatcgaggtcctcagttcacatcacgcttctggagagctttgcatcgggagatgggtactcgattagacctcagttcacatcacacttctggagagctttgcatcgggagatgggtactcgattagacctcagttcagcttttcaccctcagactgacggccagtcggagcgtacaattcagattctggaggatatgctcagggcttgtgtgattgatttcggaggtcagtgggaccagttctttcctttggcagagtttgcatataataatagttatcaggtcagcatccagatggcttcatttgagctttatatggtcggcgatgccgttctcatattgggtggtttgagactggtgaggctaagttgtatggtactgacatggtcagagatgctttagagaaagtaaaaattatccaggaaaggcttcgcacagctcaatcgaggcagaagagctacgcagatcagcgggctcgagatgtggcatttatggagggggatcaggttatgcttagagtttcaccgatgaagggcgtcatgagattcgagaagaagggcaagttgagccctaggtatataggcccatttgaggtgttagagcgagttggtgttgttgcttatagacttgctttgcctccagcgctatccggagttcatccagtttttcatgtttcgatgcttcggaggtatctcgcatacttctcccatgtgattgattatagcactattcagctggatgagcagttgagctatgaggaggagcctgtggctattgttgataggcaggaccgccagttgaggtccaagacagtttcagcggttaaggtccagtggaggggccaaccagttgaggaggcgacttgggagtccgagcgggatatgcgggacagatacccacagctattcaacacatcatgtacaattctagacccgttcgaggtcgaaggtttgtttaagagggggagaatgtaacgacccagccggtcgttttgtgtgttgggactccgttcccgtaaatgactcttcctatagcgactactagtgccttatgacttgtgtgggccggtagttcgagattcggaagtgttttggccagttcaggaacacttggttcctgaaggctagcctatttggctgattttggttccgagcagcattttgagcaaacgacctcggaatcgagttctgacagctccagcagttctggatgatgatttcggacttgggagtgtgtttgcctcgggtttctggtgacccgggagtatttcggcacctgaattggaattcaggatttcatgtgatttggaattcagcctggaattggacctcgttatatcatggtccgaatggaattccagaactggcaatagctccgtacagtcatttatgacttgtccgcaaaatttggggtcattccgagcagtgtagacccgttcggcgtattgatgagccgttgaaatttttcttgaaatcctaagtttgatctaaggggttttggagagtgattcttggtttgaatgatgtttctagtgttctgagagctcgagcaagtccgtcatatgatttgggacttgttggtataatttgtcgagggctcgggtgggcccaggggtctcccggaccccgaccggggtcaaaaaccagcaattgaactgctggtgggaatttactggtgtgaccgcacctgcggtccatgagccgcaggcgcgaggttcgcaccagcggaattccctgcgcaggtgcgactccttccgcaggagcgaccttctttccgcaggcgcagctccgcaggagcggacaaaggcccgcgggcgcgacctttcccaagggcccaggccatcgctggagcggcctattctccgcaggcgcggacaaaagcccgcaggcgcgacccaatttccgcaggtgcgagtccgcacctgcgatccaaaagtcgcaggtgtggaaactgctgggcagttccatttaaaaggccaagtcgcgaattcatttcctaaaatcacatttcttccattgttgacgaccccaagagctccagaacagatattttggcctaggaactcaggtaagtgattccgtaaccctccacatataatttcttccgttctttgagaatttcctcttcctaattcatggaaattcataagattttgtttggggaagaaagaggggtttgatgttattatgaattttaatttttgggccattgagggatgattaatggacttgatccttaggcgacgtataacgcgtttcttcaagaattataattttccggacgccgaagctcggagttgaatttccaaagtacgtcaagaatacgtttttatggaaatagttgataaatcctcctcgaatcttcctaaattgatataattatgtgtttttggctagtagcgagccatcgagggtaattcggaggattcgtgcgtcgtgttgatcggtccgttggccggaggagcacttgtccaggtgagtctcctttccaaactttgtaggggggaaatgtcccctaggctcttgattgctaattgtgctcgttgaggggggctacatacgtaccacgtgacgagagtccgtacgtggcatctatactgtatgttgggtagccgtaggacccacgaacatgttctaattgttgttcgatattatctgatgtttagtacaagttattactgatatttgttgaaattgagctatgatagctgcggatttaatgtacgcaatattcagataagaattatgaactccaccaattgagtaattgtgttactcttatataattgataaagagcaaatagtaaacgaataatgagctgttgagctaaatgaaggtggttaaaattccttctcgtacttgaattgttcgatcatggtaatattttgagcaaagaggataatatgatgaaaatcctaactttggctatcaagtaaggtgtgagtatccgatcccgttaagtgtgggcgagtcggtaccacagtgtctacatatacacatatatatatatatatatatatatacattcatgcagtcgcatacacgcattcatgcattcatggcccccgagtcacaggtttgattcgtgatcggggagaacttatatttttattgcccctgagtcacatgttgattcgtgatcaaggagaatttcacttacgttttacttgccctgagtcacaggttgattcgtgatcagggagaattatactactattttcatcggcccccgagtcacagacatgattcgtgatcggggagagttttactttgcatagtgagcacacgagtcgcaggtatgattcgcgatcgtggggagcttatcattatcgagtcagaacacgagtcgcatgtatgattcgcgatcgtggggagcttatcactatcgagtcagcgcacgggtcacatgtatgattcgcgaacgtgtggagctttatgaccgagtcagtccttatgacccacccttatgacataggccaatagtcttgtccgtgtcggttatatatatatatacgcattgcattcatccgcatttgcattgagttgggatcgtacgagggtgagttgagaaacaatacagagtactggcaaatgaacaattgagaataaagaatagtcatttcgaataatgaggaagagaacaagtaataaaactatgaatagtttacaaaaggagattatgtttgagatcagttactgattgttgcttacatgttcttatacttgatgtactagctcacatgattcattgctcagcatgtattttatttcattatgtactggaccttagtgagtatgtattctacctctcgtcactactctttacgagtttagacgggatactcactgggtacatatttgtttatatgtactcatgctgcactttccttctttttctgcacttgactgtgcaggtattgaggctggtccgtctggtcgtccgcttgttgatagaactgactgcggcgtcgctccacacggtgagctgtcttcttggcgttctcctgacagcacctccggagccttctagtttccttttgctcagtcttttgttccagactgcggcttgtatattttgtatatgtattttctacagttgtatctatgtagccgcccgttgacactgtgacactagtcctggcacacacttgttgtagttatcggggttgtatatgtatcgggcctagctgtagttcagcttgtttctacggccttaccccatgttgttattgtattccgcactttcattgttattattgttcgttggcttgcctgacctcgctgttaggcgccatcacgacctggaccggttttggatcgtgacagatagaaagaatatctagttataatttagtgaggttcaaaaggcatattcaagaatattgatattcatttccaaagagtgctcttcatttgtaacattatcctccacaagaaaagagccatgaaatattgtcattaccataggaagttcgaccagccgatgctttgattctttgcagaaatcttctacaccatcaaagcttaaccagcggtctctttgtccccagcaaactgttgtctggactgtccagttattgtccataagtattgctcttgagtcctcaacatagccctgccgatcagagataaaaaaaggaggtataagatcattatatccttaaataacgaggaagagacattaacagaactgaactagacgcatcttctgttatctacttataagactcaataggacaattttattggcttttcatgtttgtttcatggagtttctgttgacaaatagaacccctcaactaagaagcacatggcgtttcccatttggagggagaagttcggagtcaagtttgaattataaatatcaatttctatctccaacatcaaagatatctttctgacttccttcgaaattagcttatttcacctttgcatgagcaatgacagatcttggacaatcaggctctttgaacttcacagtctagattagacagagggcccttagccaactgccttggtcgaaaaataacaaagaagacaagcaacaatcataatcttcacagacaccagaatagggagagaaagaagtaaaaggaaagaacacctctgctttcagaggtgggttgcctgaaaagcagacaagagggaggagaagaaaagaaaggacaaacaaaattctagccagctagcactgaaaagagatactttggggtactatatcacttctccgataaccgtagataattaaacttcagttgattgacctgtggcgaagtgcctgcaaacaaattagaaattaacatcatgagcgtaaaagtgcaccttaagttgcttcttcattgccttgcttattgcatttaatgcaaaccctgcagaaccagatgtgagataaggtcttctgtagaccatcgccacatcttcttttatttggtaaggaccacaactcagcattgttttatcactggctctaagagggtcctgattgcaagagagttaaatcaagaatgagagacaactagcagcagatttgcagaggaacatgcatatgtcgggtagcagaacatatgtgaaaatatttgcatttaccctacctgacaaaatatttcgcccaacaaaaagttgctcagaactgataaggttgatggtagattggcatgttgcattgtcagcttcagtaaaccaagaaaatcagtggttagtgaatcaaaccaagaaaatgaattattagtgaatccgaacatgtcttcactcaactagttcgaaggagaagaaggggttgatgaaataagagtggcttcatctaaatgacatgaatctaagtcattaaacacttttatctttcatatatttggaaagagtgtaaaataatgtggtccaacgtcctagagtaagtacggatggcgttcagtcaagaagaagcaaatgaggatagagaatcaagaaaaccaaaagatatttgatatcttggatttcgttggcaatataataacctgcagagtaataaagtcatcgtaaaagcatgtactggtgacagttaagtgttgactaatccttactggtggattgagaagtataagaccgtttagcttttcctggtgattgctagcatatttgattgcaattggtgaaaaatatccctggaagagaatggcaaaaggagagcttttcttcaaatcagatacacaagataagtaacacggagcaagtaaaatgctaacagtcaaatacagtagtgcaatagatgaatatgtagggaggcatttctgtatcttggagacagatcaacggcgctgcctcccgtttaaatagggagactcagttttgttttgaacattttttttccagattgaatggaatgggcccaatagaagaatctttccatgtatataaacatacctgtactacaagagtaacctttttgtcagtaagagcattgataattgattccaaggatgccacatactctgtgagacatgagaaattgaatgttaaggagtggggatttctatattgtaataatttgttcactattatcatattccttccttcttgtgccgagggtctaccggaaacagcctctctactcctccggagtaggggtaaggtctgcgtacacactaccctccccagaccccacatgtgggatctcactgggttgttgttgtactattatcctaggtgggtagaaaatattacttaccatccaatgtatagtcaaatccgtatcttggttggggcttatctgagaatccaaatcctgaaagaaggagaaagtagaaatattcattatcctaacataaacatggatgaatgtgaacctcactattttttctaatttaaggaatagtacaaaactggaatggaagataatatggcgatactgttagaattgttgagtagcataaaaaataaaaacacattcagagacactacttcatcagttcatctaaatgtggaggtatgaatgcttgcatggacaatggaaacaattaattccgaagaacttaggagcataatgccagaaaatactaaaatactgacccagccaatcaaatgctatagcatgatagttcttctcaagaataggaagaactttgcgataagagtatgcctgtaaaatagcagtgcaagcacggttagcaaactatcaaccaagacaagtgttacatggtgaaatgatgggcatagattagtgatataaactagaattaagtagccaagaacaaaaagctggtcctattagaaggaacaagcatcagaatccacaattcttcagactagaaatgtagaacttagatggaagttggtaattgggaaatcatattgaaaataattggtccttcacctgagcttgcatttcgtttgaattaaaacaaatgccaccaaaatgttgacatgttcaagagacagtcaatcggaataaccttccaatctaactagggtttccgtgttctgagctttactaatttgaatggtaataaggcaacatcctaacctgtgagggtaatccgtggactaatacaatggtagaattgtcagtgcttccgctctctacacaaaaccatctattgcacaaaatcatatatggagagcattcattcggttatcctgcaaataacccatcctcaatttctgcatacaagattgatatatcccttaaattgtctaacaaactaactaataaattcacaaaaaaatcaaccagattcacctgaaaagatcagttgaggcctgtgaatccccacccattgtaagtccaaaaaggggatcttttgccttctccccagtcccagatacaggatgagctttcacctgaacgtcacaaaagaataccaaagttcagatgggtacaacaattattaatataaaagataaatgcactctgattttaatcagccatattcatagttatagaacatggaaaatggaaaagcagagcaggaaaaacgcacaaattttcctttcttgagccattcatcagcggggctcggctcgtctgaatattttcctgtacaaaataatcaatttgatatcactattgatccgtaattaaactgaggatgccacatccttccttgaaattaaagtaaataaaattaacagaaacaagaatgagttttgctaattattcaaattccaacctccgctaaaagaaaagccatccccaactgaaacaggagcatccagcaaatattcctgaacatttaacagaaaattacaaaaacccagaaacataaattacttcaagagaaatattgatcacgagatataacagaaaagttatacgtacctcgttgttatcgctgctcgatcggcaacggaatcgcaaaagtttcttccttccatgagctccatgattttttgggagagagaattggtgaagtggcagattaatcctatcagggggagaagaggggagcatacggaagcagtgacagtgaagagtagccatggaattcttgaacaacaaatgtgctgtgacagttatgaccgttttgtttccgattcttagaataataatacaattaaaagatttttgtgcatgggttcaaaggagatagggtgtctctggttctctatcttccattattttggaacacaaaaattggtaatacttttttctagaaaatgtaaccttagtagattttaaacttgctctactctttttcccgtaaaaaggagctcaaagactgataatctttttttcccgattattatgaactaaataaaaatactaaaggttgcacacttttgcaatcaagagttgaagatagttctaattagatttgggtaaagattaatttatttgactcttgaaaaagcaaaaatttaaagatcaaagacattacacatgaaaagtaatttgtagataggtaacttaagtcataagttaatgagattgtgtaacacgattcaaccggtagcagcattcgtttgtttgagacttttcataggttcattcggtgatttatgacttgcgggtatgatttatttggattccgagaagttcaaaaagaatttgaagcacatagtgaattacctaaaactttaagttaagagagttgatgacgagcgcaaaacacaacatgaaactaatgctagctagtcaaagatagtatagtcaaattatcgtctccacagggatatttaaattgtgttcgaataatttttagttaattattatgcagaaaaataaacacttgattgagtgattatcaactacgattaactactaaaaattaagcaattatcaattgatcacgaaagataacagttgagcaacaaagaaatatcaatgagagaagtaaggataattgactagacaggtgcaagataattgactcgagatcaaattcttgagttagttcattctataatactgttgataatcacgaatccaccagataattagatactcttgaagttaagtttcctctttcgattaaacgttaaattcagtaactaatccaattgaagcatggtgaacaattacaacgaataaaatgatggtttaatctaaagggtaacttctcgctaatattttcctattttctagttcgattaataattcaagaggctctttcgattacctaattgaatcacaaatttgtactagagcataagatataaagagattcaatataaagctccttttttcgattaagcacaataataaacaacttcacaatatgatttaaaactcaatcaattaattcaaataattgtcaagaatcgaatccctagtcaagttatcaatgcatcgtatctgtcaacaccttaagggaaattgctccataacaatggaacaattcatctcaagaaagtttaaagacataaaaagtatcaatgctaatgattcgatataaactctcgtattgcaccgattgttggttgaaattttgatgaattcttgtgtgttcttgccttagttgcttctcaaatccttcctatatcaaaaagtccacccaaaatcgtgtatatgatatatttatactgtgtaaaaagtgggtccggatgaaactaccatttccaagccggaacaaaaaaatactctgggaaaaatgcacaggtgagccgcgcctcccatcccaccatggggcaggcctttggagattatcaaagagaagtttctgacatagcagtcacacttggattgtcgccccgtgccctgtggcgcctcatgtgccacgccaatatttttttctcagagtaattgtttttctactttttgacatcccaacttggtcctcgactccgctccttggacttttttacttagacttcaaagctcctatttgttcaatacagctccaaattaactttttagctcgaaatcactttctacaaagcataaaacacgtaataagtgcagttcactatcgtttaagctcaaacacacataaattacaataattagagtgtaaaacacggctttctagcctatcatcagttgactaaagttaacattttaagtaagaggacttggaatcaagatttaaaattttctataggttcatatgcacgttttaaacttgtacttatattcgaattgggagccgaagggctcggattcaatttggcactatttcatgaaaatggaagtttaaggtttataaatttaacttaagagttaattttgcattgcagtacttcctttcatgttttgagccttgggataagttcataaagaatatttggacttgttgagatggtttggagggatttcgggaggctcgggtgagttacgacgcgtttggagcaagtattgaaagatttaaagtgttgaaacatagttttctacatttgactgactttacaagaaaacatactctaatctgcaaagaatctggtggagatgcctcgatgagagttgtaaccctttgaatcctgtttccagaaattcaaattgttcgttattccaacatttgtacgaaacgttatgactgtttaagtgaataaaggaaaatgttattatttttgaaaatatgcaccaaaaattctgcacttgtgtatataacctcatttaatacttggacttcattttatcattttgggagctcggtatctcgatgtgaggtgattttcgaagcggttttctcctaacataacagtgtaagtggttctcactcatatcatgattataacatgaatatatcatcaatttcaccttataatcaaggattcaaaggagaaaaaaagaattttaacttgaaagttaagaaagtataatttggggttttgaacatcgatttggactagaatttagaaattatgcaaatatttggactcgtaaaattatgacatatggccttgttggagccactcaaataggctccgtactcatccctcttggtggctggaatatatttctgtagaaagatgtacgtaaaccgatcccaagtcaatagagatgcaccttctgatcaacccagaagataatcctgccaccattcatgggatttccccttagttgaaaaatggtgaagtgcataccattagactccactagtcccaaattatatagcatgtccttgcaacggtcaataaaatcatgtgagtcttctgacggctcaccgtcaaagtggaaaggatgaagcctagtaaatctgtccagcagcttctgcttatcgacaattgcagatggtctaatctctactctagacgttgcaaccgggtgaataccacccataaatagtacccttggggtttgataaattgcaaaaacttgccccagcgcatgagcggtaggagtttgggctccccctacgtcttgagatgtagttggctctgctggaaatggtctggtttgagccatagtgtccataaaccgcaacatgtggtccataacctcctgaaatcctggagcggtcttgaactctaccggggcctgctaaggtgcaagtatctgatcatactcctcaataataagattctccactagatccactggtgatgccactggggctacgctaggacgtccttgtccttcaataggagctctggccctcccaacgacttctgcctctacctctaatggtagggggtgcagcccctttaccgccggatgatgccatcgcatggttctcgccatatgtgagaataagataaagatttagattagaacaaaatcagcaacatgataggaaaatgaataaaaagaatcttcctaatattgtaacgacccggtcggttgttttgagagttagagccccgatcccctaataatttctttccccgcgtttgtttttgctattgggacttttcggagtgattagttatggaattcggagagttttgggacacatagtccctaattatgagtttaagccttagaaatcaggccgtagtcaaaattgtgtaaagacgtatccggaatggaattccatcaactccgttagatccgttgagtgattttggagttaggagcgggtccagaatgtgttgtcgaggtctgtagtagatttaggcttgaattgacgaaagttagattttcggcgatttctttcgataggtgaaattttgatatcgggctcggaatggaattccgagagtgggtgtaggttcgtgtgatgacccaaggggtcatatgaatatagactctgttctaggcttaatagcactaaaagattaattttaaatacatcgatttgcgtgcgcagtccaggcgtgaaaccgtgaatcttttatgtgaaaatatgagaaatagtaatttctagagttaaaatttgattatagtttacgttggtcaacattttgagtaaacggacccggatacgtgttccgacgatcccgggagatccgtagtaatgtgatgacccaaaaggtcatcctaagtaattccagctaaatctgtgttctgagacctcgaaagcctccgttaatctcacctcgatatgtgtgcgcagcccgggcaggtagccgggaagcttccatgtgaaaatttgataaaaatgggattttttgaattgaataattgaataaagttgactttggtcaacatttttggtaaacggatctggacccgtgatgtgacggtcccggagggtccgtaggaaaatatgggacttgggcgtatgcccggaatcgaattctgaggccccaagcccgggaaatgaatttttaaagaaaattgttttctaaaaataataaaggaatgtgaaagtgaataattatgtgaaaaccttattaccgggtccatgttatggtttcggagcccggaacaggtttataatatgttgtttgtcctatctgtgagatttggtgtaaaacgggtttgatttgattggtttaggatccaagtgaggaaaaatggagttaatgaacttgtggggtttctaaagaatttgaaatgtggcttgagaggtgattttatgttcccgaggtccgaatgaaattccgagaccgggaatagttccgttgtgtcgtttataacttatctgcaaaatttgaagtcattccgagtggtttaggccggttcggcgcgttgaagtgaattctagaatttccaagttcttaagttttgaattcaggggttttggagggtgattttgagttttatctttgtgttgagtgttccgtgggctcgagcaagtccgtctaatgatttaggacttgtcgttatatttggtcgagggctcaggtggacctaggtgcctcccggaccccggacgaggtaaaaaaccagcaaaaatcactgttggtgcacagcagctggtgtgaccgcaggtgcggttgtccagccgcaggtgcgggaccgcacccgcggtccaggccatcgcaggtgcgacttttccgcaggggcgaccaaaattccgcaggagcgggaccgctggtgcggctcccaaccccgcaggtgcgagcctagggtcccaggcccttttccgtaagggcgatcgctttctcgcaggcgcgaggccgcacctgcgatcctaaggtcgtaggtgcggaaactcctgttggcagccctcttaaaatgtccaaaatttcgggttttcctcattcctcccatcttcaaactccattagagatcatccaagcttggggcatcaccttccacgaccacccactgtaagaggtaagtaaaaccccataaaacttctaattttaacaatatttcctagcttaattcactaataaaccacctaaaatcattgaattaggtagtaaattttagggttcttaggaatttcgtgattttccatgttaggccataaattcttgaataaattacataacttcgatccttagactccgggtaattgattccttcatgaattttcgaaaatctaaacgtgtgggcccggggtcgaattttagtattcttggaagaatagtaggaaatgcataacttggcttagaaattgattattgggtacttattgatgttaataaatccattatgtctagatatccccgatttggagttggattcgagaggaaaggctgtgattgaggcttgacttgcattgtcttgggagccgaggtaattgtttggcttaacctcagcttgagggattaggtatagagtcttatttgctatgtgcaactcatgtccaacgtataggcgtggtgacgagtgcctatgcgttgcggtcaagtatgcccgtgagtcaattgtgatgaaatttgctatgttcttaatattccccgcactctgagtaaattatgaattaaaagtgatacttgatgttgtttcatgatgtggagatttattgagttatttgttccagttgaggcttacactgttgaaattgtattactgatgcgaggttggttatagctgagacccttgtcgggcatatggtgatgttgtaaatgatgatttctccttgccggaacaatagaattgtattgaatatttccatgcacttgagacttcgtgttgttgactttcatattattgttgccttgtgtttttattattcgtcgcacgaggggacatgccgtgttgactgagtgttattatattatatatgcacgaggggacattccgtgccgagtgattgtgaggttatgcacgaggggacattctgtgccgagtgattgtgaggttatgcacgaggggacattccgtgccgagtgttattatatatgcacgaggggacattctgtgccgagtgattgtgaggttatgcacgaggggaaattctgtgccgagtgttattatatatgcacgaggggacattccgtgccgagtgactatgaggttatgcacgaggggacatgtcgtgcctttcctgttcattatatgtttgagaagctatattcctgccttgtctttacgtttcatttattaccttgtactgctgtgctagcatactgttacctatcttcccagcatgttctccccgtatctgtcctacttgcttattctgttgccatttttcctgctattatataaaaattgcacaggtacatatgttgtgttggtcctagcctcgtcactacttcgccaaggttaggctcgacacttactcagtacatggggtcggttgtactgatgctacatctgcacttctttatgttgtgcagactatgcagccggacccggagatcactgacggtcggagcatctcttcagtcacacaggagactcgaggtagacccgcagacgttcgtgggcctttacgtcaccttctactttccattttcagctctgtcttaccttgtatttcaaagacagtcttatgtatttatttcagaccttttgtttgtagtaatctcttagatagtccgtgagtaggtgacaccagttctgggatttgtttatgtgttttatttcgaaaaatgctatgttgtattttgggttattttgttaaattttatatggtgggccatcgaagccttggttatcttattcgtatttgttgttaataaattttatttagttcaaacgttggcttgtctagcgggttcaacgttagacgcagtcatggcccgaaggtgggatttttgggtcgtgacaagttggtatcagagcacaaggttgcttaggtctcacaaactcacggacaaacttgatagagtctgagggatcggtacggagacgtctgtacttatcccttagaggctgcaaagttaggaataacttcacatctttcattctctgtcgtgccaatggaattctgaatgctaattgagtctctattttactctctcgcagatggcgagaacgcgtgcttcctcctcgaccgaccagcgacctgatccttctattacagctcctacgaggggccgaggctgaggcagagctagagcagcagctcaagtagaggacccacaggtagactttgccggtgaggttcctactccgacagtcctagttggactgactcaggtcccagaggggttcattgccacctcagtacttcaggatgctctagtccacttagtgggactcatggagagcgtggctcaggacggtcttcttcctactgcaccctttcgatctcaggatgggggagggacccagactcctactatatacacgccagagcagtttgccactcagttccagactccggcacctcagacggctggagtagttcagtcaggtattgtggcaccagccgttgagggagaagccatgtccgcagatgctctgtggaggttggattggttcaccaagttatttactaccacatttactggtgcaccatcagaggatccccaggattatttagacagttgttatgaggttcttcggaacatgggcattgtggagtccaatggagttgattttgctacatttcgtcttactggcacagccaagacttggtggagagattactgcttgaccagaccagctgggtctacacttttgacttggggtcagttctccgatttgttcttgggaaagttccttccagttactcaaagagaggatcttcggaggcagtttgagcatctacaggagggccccatgtccgtcactcagtacgagaccaggtttattacgctggccaggcatgcccttatgatactccccactgatcgggagagggttcggaggtttatcgagggtctggctcagcccatcaggctttagatggccagagagacgggtactgatatctcctttgaggatgcagccgatgtggccaggcgcattgagatggtattatcccatggtggtggtcaggggtctgacaagagacctcgtcatttcgggcgtttcagtggtgccttattctggaggcagagattcctttggtagaggccaacctcctaggccttatcagtcggcactccaggtatcccgcagtgcacctgcagcttccatcagtgcaccgccgatccagagctatcagggtggtcattctggtcgacagggtcagttccagggtcagtattctcagcagccgaggtcttgcttcacttgcggttgtatggggcatatttccaggttttgcccccgaggttttggtgggtctcagtatcagggttcccgtgccatggttcccgcaccaggtgcactggtggtcgtggtgccagaggtggaggtcagactcatagaggtggagggtaggccatgaggggtagaggtcagcccgtagcaggtagacccagagatatacaggttggaggggctcagccccggtgttatgcttttcctgctcgtccagatgctgaggcttctgatgcagttatcacaggtacagtttcagtttgcagccgagaggcttcagtgttatttgatccaggttctacattctcctatgtgtcttcatactttgccccttatccgtgactccttgggtactgctgtacatgtgtctacatcggtgggtgattctatagtggtagatcgagtctaccgtgcttgcgtagtagctattggtggtctggagactcaggttgatcttttgcttcttgatatggttgactttgatgttatattggggatggattggctatctccatatcatgctatcatggactgtcatgccaagacagtgaccttggccttaccaggagtgcctcgtttagagcggagggggactcctagtcattcttctggcagggttgtttcttatatgaaggctcggcgcatggtcgagaagggttgtttggcctatctggcctatgttcgtgattctagtgctgatgttccttccatagagtccgtgcccgtggttcatgaatttccagaggtattccctgctgacctgccgggtatgccacccgacagggatattgacttttgtattgagctagctgagggcactcagcccatttctattcccccgtatcgtatggctccgccagaattgaaggaattaaaggagaaattgcaggagttgttgggtaaagtcttcatcaggcctagtgtttcaccttgggtgctccagtattgttcgtgaagaagaaagatggctcgatgaggatgtgtattgactaccgacagttgaataaggttactgtcaagaacaagtatcctttgtcgaggattgatgatttacttgatcagcttcagggtgctacggtgttctctaaaatagacttgaggtctggttatcatcagctgaggattagggcttctgatgtgcctaagacatcttttcgcactcgttatgggcattatgagttcttggtcatgtcgttcgggttgactaatgcccccgctgctttcatggaattgatgaatcgggtattaaggccttatctggactcctttgtgatcgtgtttatagatgatattttggtatactcttgcagccgagaggagcatgagcagcaccttcgagtcatcctccagactctgagggatagtcagttgtatgccaaattttcgaagtgtgagttctggctgagttcagtggcatttctgggccacgtggtatcggcagagggtattcaggtggatccgaagaaagtttcagcagtcagagattggtctaggcccacttcaatcacagagattcgaagtttcttgggcctagcatgctataatcgccggtttgtggaggggtcttcgtctattgcagcccctatgaccaagttgacgcagaagagtgctcagttcagatggtcggaggagtgtgaggcgagctttcaaaagctcaagagagcattgaccaccgcaccagtgctggtactgcccataggttcaggttcttatatcgtgtattgtgatgcttcgagagttgggcttggtgcagtgttgatgcaggatgggaaggttatagcctatgcttcacgccagttgaagattcatgaaaagaactacccagtccatgatttggagcttacaactattgttcatgccttgaagatttggaggtactatttgtatggggtaccgcgtgagattttcactgatcacaagagtttgcaatatttgtttaggaaaaaggagttgaatatgaggtagaggaggtggttagagttgctgaaagattatgatattactatcctctatcatccaggaaaggccaacgtggtggccgatgccttgagccggaagtcagtcagcatgggtagtttggcttatctatcagtgggagagcgacctttggctttggatgttcaggcgttagccaatcgatttgtcagattggaggtttctgagggtggtagtgttttggcccataccgtttctcgttcgtcattgtatgatcgcattcgcgccaggcagtatgaggatcgtcatttgtgtgcacttagggatgcgcttcggcacggacgtgccaagcaggtcacagtcgatgccgacggagtcttgagattgcagggtcacatatgtgttcctgatgttgacggcattcgtgagttaatattgcaggaagcctatagttcccgatattccgttcatccgggcgccgcaaagatgtaccaggacttgcggcagcattattggtggcccaaaatgaagaaggatatcgtggcttatgtggctcggtgcttaaattgtcagcaggttaaatatgagcaccagagacccggtggtttgatgcagcagattcagcttcccgagtggaagtgggagcgtatcacgatggattttgtagttgggctcgcacggactcagaggatggttgatgcagtatggattgtggtagataggttgaccaaatcagcccatttcattccggtggaggtttcatcttcagcagagaagttggctcagatctatattagagagattgtcagattgcacggtgtgccctaatctatcatatcagaccgaggtactcagtttacctcccatttctggagagtatttcagagagagttgggcactcacatagagttgagcacatcatttcatcctcaaacggacggacagtccgagcgcaccattcagattttggaggatatgttgcgggcatgtgttattgattttggtggttcatgggaccagttcttgccgttagcagagtttgcctacaacaacagttaccagtcgagcattcagatagctccgtatgaggcgttgtatggtaggcgatgtcggtctccagtcggatggtttgagaccggagaggctagattactaggttctgagttagtccaggatgccatggataaggtgaagattattcaggataggcttcgtacagctcagtccaggaaaaagagctatgcagatcgtagagttcgagatttggcttttatggtaggagaccaggtattccttggagtgtcgcctatgaagggcgtgatgagattcggaaagaggggcaagttgagccctaggtatattggcccatttaaagttttagatgaagtaggagaggtggcctacagacttgccttgccaccgcatttatccgcagtgcatcccgtgtttcatgtatccatgctccggaagcacattgtagatccatctcatgttcttgatttcagcggtgtccaattagacaaggatctgacttatgaggaggagccagtagccatattagataggcaggttcgccagttaaggtcgaagagttatcctttggtccgtgttcagtggaggggtcagcctgccaaggaagctacttgggagtccgagtccgacatgagtagtcgttacccccatcttttctcagactcaggtactttactatatccattcgacgacgaacgtttgttttagaggtggagattgtgatgacccaaaaggtcatcctaagtaattccagctaaatctgtgttccgaggcctcgaaagcctccgttaatctcacctcaatatgtgtgcacagcccggggcaggtagccaggaagcttccatgtgaaaatttgataaaaatgggattttttgaattgaataattgaataaagttgactttggtcaacatttttggtaaacggatctggacccgtgatgtgacggtcccggagggtccgtaggaaaatatgggacttgggcatatgcccggaatcgaattccgaggccccaagcccgggaaatgaatttttaaagaaaattgttttctaaaaataataaaggaatgtgaaagtgaataattatgtgaaaaccttgttaccgggtccgtgttatggttccggagcccggaacaggtttataatatgttgtttgtcctatctgtgagatttggtgtaaaacgggtttgatttgattggtttaggatccaagtgaggaaaaatggagttaatgaacttgtggggtttctaaagaatttgaaatgtggcttgagaggtgattttatgttcccgaggtccgaatgaaattccgagaccgggaatagtttcgttgtgtcgtttattacttatctgcaaaatttgaagtcattccgagtggtttaggccggttcggcgcgttgaagtgaattctagaatttccaagttcttaagttttgaattcaggggttttggagggtgattttgagttttatctttgtgttgagtgttccgtgggctcgagcaagtccgtctaatgatttaggacttgtcgttatatttggtcgggggcccgggtggacctaggtgcctcccggaccccgcacgaggccaaaaaccagcaaaaatcactgttggtgcacaacagctggtgtgaccgcaggtgcggttgtccagccgcaggtgcgggaccgcacccgcggtccaggccatcgcaggtgcgacatttccgcaggggcgaccaaaattccgcaggagcgggaccgctggtgcagctcccaaccccgcaggtgcgattccagggtcccaggcccttttccgtaagggcgatcactttctcgcaggcgcgaggccgcacctgcgatcctaaggtcgtaggtgcggaaacccctgttggcagccctcttaaaatgtccaaaattttgggttttcctcattcctcccatcttcaaactccattagagatcatccaagcttggggcatcaccttccacgaccacccactgtaagaggtaagtaaaaccccataaaacttctaattttaacaatatttcctagcttaattcactaataaaccacctaaaatcattgaattaggtagtaaactttaaggttcttaggaatttcgtgattttccatgttaggccataaattcttgaataaattacataacttcgatccttagactccgggtaattaattccttcatgaattttcgaaaatctaaacgtgtgggcccggggtcgaattttagtattcttggaagaatagtaggaaatgcataacttggcttagaaattgattattgggtacttattgatgttaataaatccattatgtctagatatccccgattcggagttggattcgagaggaaaggctgtgattgaggcttgacttgcattgtcttgggagccgaggtaattgtttggcttaacctcagcttgagggattaggtatagagtcttatttgctatgtgcaactcatgtccaacgtataggcgtggtgacgagtgcctatgcgttgcggtcaagtatgcccgtgagtcaattgtgatgaaatttgctatgttcttaatattccccgcactatgagtaaattatgaattaaaagtgatacttgatgttgtttcatgatgtggagatttattgagttatttgttccagttgaggcttacactgttgaaattgtattactgatgcgaggttggttatagctgagacccttgtcgggcatatgctgatgttgtaaatgatgatttctccttgccggaacaatagaattgtattgaatatttccatgcacttgagacttcgtgttgttgactttcatattattgttgccttgtgtttttattattcgtcgcacgaggggacatgtagtgttgactcagtgttattatattatatatgcacgaggggatattccgtgccgagtgattgtgaggttatgcacgaggggacattctgtgccgagtgattgtgaggttatgcacgaggggacattccgtgccgagtgttattatatatgcacgtggggacattctgtgccgggtgattgtgaggttatgcacgaggggacattctgtgccgagtgttattatatatgcacgaggggacattccgtgccgagtgactatgaggttatgcacgaggggacatgtcgtgcctttcctgttcattatatgtttgagaagctatattcctgccttgtctttacgtttcatttattaccttgtactgctgtgctagcatactgttaccctatcttgccagcatgttctccccgtatttgtcctacttgcttattctgttgccattattcctgctattatataaaaattgcacaggtacatatgttgtgttggtcctagcctcgtcactaattcgccgaggttaggctcgacacttactcagtacatggggtcggttgtactgatgctacatctgcacttctttatgttgtgcagactatgcagccggacccggagatcactgacggtcggagcatctcttcagtcacacaggagactcgaggtagacccgcagacgttcgtgggcctttacgtcaccttctactttccattttcagctctgtcttaccttgtatttcaaagacagtcttatgtatttatttcaggccttttgtttgtagtaatctcttagatagtccgtgagtaggtgacaccagttctgggatttgtttatgtgttttatttcgaaaaatgctatgttgtattttgggttattttgttaaattttatatggtgggccatcgaagccttggttatcttattcgtatttgttgttaataagttttatttagttcaaatgttggcttgtctagcgggttcaacgttagacgcagtcatggcccgacggtgggatttttggatcgtgacaagttggtatcagagcacaaggttgcttaggtctcacaaactcactgacaaacttagtagagtctgagggatcggtacggagacgtctgtacttatcccccagaggctgcaaagttaggaataacttcacatctttcattctctgtcgtgccaatggaattctgaatgctaattgagtctctattttactctctcgcatatggcgagaacgcgtgcttcctcctcgaccgaccagcggcctgatcctcctattacagctcctacgaggggccgaggccgaggcagagctagagcagcaactcaagtagagaacccacaggtagactttgccggtgaggttcctactccgacagtcctagttggaccgactcaggtcccagaggggttcattgccacctcagtacttcaggatgctctagtccgcttagtgggactcatggagagcgtggctcaggacggtcttcttcctactgcaccctctcgatctcaggttgggggagggacctagactcctgctatatacacgccagagcagtttgccactcagttccagactccggcacctcagacggctggagtagttcagtcaggtattgtggcatcagccgtggagggagaagccatgtccgcagatgctctgtggaggttggattggttcaccaagttatttactaccacatttactggtgcaccatcagaggatccccaggattatttagacacttgttatgaggttcttcggaacatgggcattgtggagtccaatggagttgattttgctacatttcgtcttactggcacaaccaagacttggtggagagattactgcttgaccagaccagctgggtctgcacttttgacttggggtcagttctccgagttgttcttgggaaagttccttccagttactcatagagaggatcttcggaggcagtttgagcatctacagcagggctccatgtccgtcactcagtacgagaccaggtttattacgctggccaggcatgcccttatgatgctccccactgatcgggagagggttcggaggtttatcgagggtctggctcagcccatcaggctttagatggccagagagacgtgtactgatatctcctttcaagatgcagccgatgtggccaggcgcattgagatggtattatcccagggtggtggtcaggggtctgaaaagagacctcgtcatttcgggcgtttcagtggtgcctcatctggaggcagagattcctttggtagaggccaacctcctaggccttatcagtcggcactccaggtatcccgcagtgcacctgcagcttcaatcagtgcgccgccgatccagagctatcagggtggtcattctggtcgacagggtcagttccagggtcagtattctcagcagccgaggtcttgcttcacttgcggtggtatggggcatatttccaggttttgcccccgaggttttggtgggtctcagtatcagggttcctgtgccatggttcccgcaccaggagcaccctcaccccctcagccagctaggggtggtggtcgtggtgccagaggtggaggtcagcccgtagcaggtagacccagagatatacaggttggaggggctcagccccggtgttatgcttttcctgctcgtccagatgctgaggcttctgatgcagttatcacaggtacagtttcagtttgcagccgagaggcttcggtgttatttgatctaggttctacattctcctatgtgtcttcatactttgccctttatttgagtatgccccgtgactccttgggtactgctgtacatgtgtctacaccggtgggtgattctatagtggtagatcgagtctaccgtgcttgcgtaatagctattggtggtctggagactcaggttgatcttttgcttcttgatatggttgactttgatgttatattggggatggattggctatctccatatcatgctatcatggactgtcatgccaagacagtgaccttggccttaccaggtgtgcctcatttagagtggagggggactcctagtcattcttctggcagggttgtttcttatatgaaggctcggcgcatggtcgagaagggttgtttggcctatctggcctatgttcgtgattctagtgctgatgttccttccatagagtccgtgcccgtggttcgtgaatttccagaggtattccctgctgacctgccgggtatgccacccgacagggatattcacttttgtattgagctagctgagggcactcagcccatttctattcccccgtatcgtatggctcgatgaggatgtgtattgactaccggcagttgttgggtaaagtcttcatcaggcttagtgtttcaccttggggtgctccagtattgttcgtgaagaagaaagatggctcgatgaggatgtgtattgactaccggcagttgaataaggttattgtcaagaacaagtatcctttgccgaggattgatgatttatttgatcagcttcagggtgctacggtgttctctaaaatagacttgaggtctggttatcatcagctgaggattagggcttctgatatgcctaagacatcttttcgcactcgttatgggcattctgagttcttggtcatgtcgttcgggttgcctaatgcccacgctgctttcatggagttgatgaatcgggtactaaggccttatctggactcctttgtgatcgtgtttatacatgatattttggtatactcttgcagccgagaggagcatgagcagcaccttcgagtcatcctccagactctgagggatagtcagttgtatgccaaatttttgaagtgtgagttctggctgagttcagtggcatttctgggccacgtggtatcggcagagggtattcaggttgatccgaagaaagtttcagcagtcagagaaatgcctaggcccacttcagtcacagagattcaaagtttcttgggactaacatgctataatcgcctgttcgtggaggggtcttcgtctatagaagcccctatgaccaagttgacgcagaagagtgctcagttcagatggtcggaggagtgtgaggcgagctttcagaagctcaagagagcattgaccaccgcaccagtgctggtactgcccataggttcaggttcttataccgtgtattgtgatgcttcgagagttgggcttggtgcagtgttgatgcaggatgggaaggttatagcctatgcttcacgccagttgaagattcatgaaaagaactacccagtccatgatttggagcttgcagctattgttcatgccttgaagatttggaggtactatttgtatggggtaccgcgtgagattttcactgatcacaagagtttgcaatatttgtttaggcaaaaggagttgaatatgaggcagaggaggtggttagagttgctgaaagattatgatattactatcctctatcatccaggaaaggccaacgtggtggccgatgccttgagccggaagtcagtcagcatgggtagtttggcttatctatcagtgggagagcgacctttggctttggatgttcaggcgttagccaatcgatttgtcagattggaggtttctgagggtggcagtgttttggcccataccgtttctcgttcgtcattgtatgatcgcattcgctccaggcagtatgaggatcgtcatttgtgtgcacttagggatgcggttcggcacggacgtgccaagcaagtcacagttgatgccgagggagtcttgagattgcagggtcgcatatgcgttcctgatgttgacgacattcgtaagttaatattgcaggaagcccatagttcccgatatttcgttcatccgggcgccgcgaagatgtaccaggacttgcggcagcattattggtggcgcaaaatgaagaaggatatcatggcttatgtggctcggtgcttaaattgtcagcaggttaaatatgagcaccagagacccggtggtttgatgcaacagattccgcttcccaagtggaagtaggagcgtatcacgatggattttgtagttgggctggcacggactccgaggatggttgatgcagtatgggttgtggtagataggctgaccaaattagcccatttcattccggtggcggtttcatcttcagcagagaagttggctcagatctatattagagagattgtcacattgcacggtgtgccctaatctatcatatcagaccgaggtactcagtttacctcccatttctggagagtatttcagagagagttgggcactcacatagagttgagcaaagcatttcatcctcaaacggacggacagtccgagcgcaccattcagattttagaggatatgttgcgggcatgtgttaattattttggtggttcatgggaccagttcttgctgttagcagagtttgcctacaacaacagttaccagtcgagcattcagatagctccgtatgaggcgttgtatggtaggcgatgtcggtctccagtcggatggtttgagaccggagaggctagattactaggttctaagttagtccaggatgccatggataggtgaagattatttaggataggcttcgtacagctcagtccatgcaaaagagctatgcagatcgtagggttcgagatttggcttttatggtaggagaccacgtattccttcgagtgtagccaatgaagggcgtgatgagattcggaaagaatggcaagttgagccctaggaatattggcccatttaaagttttagatgaagtaggagaggtggcctacagacttgccttgccaccgcatttatctgcagtgcatcccgtgtttcatgtatccatgctccggaagtacattgtagatccatctcatgttcttgatttcaccggtgtccaattggacaaggatctgacttatgaggaggagccagtagccatattagataggcaggttcgccaattgaggtcgaagagttatccttcggtccgtgttcagtggaggggtcagcctgccaaggcagctacttgggagttcgagtccgacatgagtagtcgttacccccatcttttctcagactcaggtactttactatatccgttcgacgacgaacgtttgttttagaggtggagattgtgatgacccaaaaggtcatcctaagtaattccagctaaatctgtgttccgaggcctcgaaagcctccattaatctcacctcgatatgcgtgcgcagcccgggcaggtagccgggaagcttccatgtgaaaatttgataaaaatgggatttttgaattgaataaagttgactttggtcaacatttttggtaaacggatctggacccgtgatgtgacggttccggagggtccgtaggaaaatatgggacttgggcgtatgcccggaatcgaattccgaggccccaagcccgggaaatgaatttttaaagaaaattgttttctaaaaataataaaggaatgtgaaagtgaataattatgtgaaaaccttgttaccgggtccgtgttatggttccggagcccggaacaggtttataatatgttgtttgtcctatctgtgagatttggtgtaaaacgggtttaatttgattggtttaggatccaagtgaggaaaaatggagttaatgaacttgtggggtttctaaagaatttgaaatgtggcttgagaggtgattttatgttcctgaggtccgaatgaaattccgagaccgggaatagttctgttgagtcgtttataacttatctgcaaaatttgaagtcattccgagtggtttaggccggttcggcgcgttgaagtgaattctagaatttccaagttcttaagttttgaattcaggggttttggagggtgattttgagttttatctttgtgttgagtgtttcgtgggctcgagcaagtccgtctaatgatttaggacttgttggtatatttggtcgggggctcgggtggacctaggtgcctcctggaccccgcacgaggccaaaaaccagcaaaaatcacggttggtgtgcggctggtgtgaacgcaggtgcggttgtccagccgcaggtgcggaccgcacccgcggtccaggccatcgcaggtgcgacttttctgcaggggcgaccaaaattccgcaggagcgagaccgctggtgcggctcccaacctcgcaggtgcgagcccagggtcccaggcccttttccgtaagggcgatcgctttctcgcaggcgcgagtgttattatatatgcacgaggggacattccgtgccgagtgactatgaggttatgcacgagggggcatgtcgtgcctttcctgttcattatatgtttgagaagctatattcctgccttgtctttacgtttcatttattaccttgtactgctgtgctagcatactgttaccctatcttctcaacatgttctccccgtatctgtcctacttgcttatttctgttgccatttttcctgctattatataaaaattgcacaggtacatatgttgtgttggtcctagcctcgtcactacttcgccgaggttaggctcgacacttactcagcacatggggtcggttgtactgatgctactcctgcacttctttatgttgtgaagactacgcagccggacccggagatcactgacgatcggagcatctcttcagtcacacaggagacccgaggtagacccgcagacgttcgtgggccttgatgtcaccttctactttccattttcagctttgtcttaccttgtatttcaacgacagtcttatgtatttatttcagaccttttgtttgtagtaatctctcatatagtccgtgagtaggtgacaccagttgtcacgacccgaaatcccaccttaaggccatgactacgtctaaaggtgaaccccccagacaagccaacgtataactaaatataactcgttaacgactgaaacgagcaaattaactagggcatcaatggcccccaatatgaaatttagcaaataacccaaaatataacatagcagattcgaaatacaacccatacacgaaatcccagaactggtgtcacacactcacggactatctaagagattactacaaacaaaaggtatgaaataaacacataagattgtctttgaaatacaaggtaagacagagctgaaagtggaaagtagaaggtgacgtcaagtcccacgaacgtctgtgggtctacctcgagtctcctgtgtgactgaatgagatgctccgatcgtcagtgatctatgagtccggctgcgtagtatgcacaacataaagaagtgcacttgtagcatcagtacaaccgaccccatgtactgagtaagtgtcgagtctaacctaggcgaagtagtgacgaggctaggacaaccactacatacgtacctatgcaattttatataatagcaggaaaaatggcaacagaaataagcaagtaagacagatacggggagaacatgctggggatacagggtaactatatgctaacacaactgtacaaggtaataaatgaaacgtaaagacaaggcagaaatatagcttctcaaacatataatgaacaggaaaggcacgacatgtcccctcgtgcataacctcacagtcactcgtcacggaatgtaccctcgtgcatatataataacactcggcatggaatgtcccctcgtgcataacctcacaatcactcggcacagaatgtcccctcgtgcttatataatatcactcggcacggaatgtcccctcgtgcataacctcacaatcactcggcacggaatgtcccctcgtgcataacctcataataactcggcacggaatgtcccctcgtgcatatataaaaacactcgacatagaatgtcccctcgtgcataacctcacaatcactcagcacggaatgtcccctcgtgcatatataataacactcagtcaacacagcatgtcccctcgtgcgacgaataataaaaaaactcaaggcaacaataatgtgaaaatcaacaatactaagtctaaagtgcatggaaatattcaatacaattcccttgtcccatcaaagagaattcatcaattacaatatcatcaaatgcccgacaagggtctctgctataaccaacctcgcatcagaaatataatttcaacagtgtaagcctcaactggaacaaataactcaataactctccacgtcatgaaacaacatcaagtatcacttcttattcataatttactcttagtgtggggaatattaggaacatagcaaaatttcatcacaattgactcacgggcatacttgaccgcaatgcataggcacttgtcaccacgcctatacgttggacatgagttgcacataacaaataagactctatacctaatccctcaagctgaggttaagccaaacacttacctcggctccaaaattgcaagtcaagcctcgatcacagccattcctttaaaatccgacttcggaacggtattatctagacataatcaacccaagtatatcaataatggctcaataaatcaaacccatagcctaatcatttatttcaaagcattcttcctaagatttcgaaatttgaccccgggcctgcttggtccaaacacgaggctcggaccaaaacccgatcacccataaccccacgagttagaatatatgacttgtgttaagattcaaccccaaatggaggttgaattattcaaaattctaaaaatccaactttacctagaatccttaattcctaccttaatttccatgtttttaggcctagaatctagtgattagttgatgcaattaagagaaaatgatgataagaacacttaccttgggaactatggaggttggggagcttgattctcggttatggaggtttggggaagaagggggaagtgaaaaatgggagtgacccgtaatgggtctgtttttggggttaaaaatataactgggcgtttttaatgctatgcgatcgcggaacatgaggtgcgatcgcatagaggtgagttgcttaagctctgcgatcgcagaaaaccttgtgcgatcgcacagggcaattctacccacccccaggccctatgctaacctctgtgcgttcgcagtaccccacatgcgttcgcagagtattaaccctggaccctccgcgatcgcgccctttgaggtgcgttcgcactgaacaactaaccccccagcccccttcctacctattacactatgcgatcgcagagaagcaagtgcgatcacatagtgcatcagaccccatcacatgccaatgctatgcgattgtagggaggaatctgcgatcgcactgaaggaggtatcagacaccagaaaactggaggaacaccagattttttcctactttttgcactccgatgcctacccgaaactcacccgagccctcgaggctcaaaaccaattacacacacaacctcataaacatcctacggacttgtgcaaataattaaaccaccaaaatacatcaaaaacagggaattaaactccaaaaccaaattaatcaaacttaagaactttgaatttctagaattcacctcaacgcgccgaaccggcctaaaccactcggaatgacctcaaattttgcagataagttatgaatgacacaacggaactattcccgatctcagaattttattcagacctcgggaacataaacttacctctcaagccatatttcaaattctttagaaaacccacaagttcattaactctatttttttcctcatttggatccaaaaccaaccaaatccagcccgttttacaccaaattccacagataggacaaataacatataacaaacctgttcagggctccggaatcgtaatacgggcccggtaacacggttttcacagaattattcatttttaaaagcctttattattttcagaaaacaattttctttaaaaattcatttctcgggcttgggacctcgaatttgattccgggcatacgcccaggtcccatattttcttacggaccctccgggaccgtcacatcacgggtccggatccgtttaccaaaaatgttgaccaaagtcaactttattcaattattcaattcaaaaatcccatttttatcaaattttcacatggaagtttcctggctacctgcccgggctccgcacacatatcgaggtaagattaacggaggctttcgagacctcggaacacaaatttagctggaattactcaggatgaccttttgggtcatcacaatctccacctataaaacaaacgttcgtcctcgaacggatatagtaaagtacctgagtctgagaaacgatgggggtaacgactcctcatgtcggaatcagactcccaagtagctgcctcggcaggctgacccctccactgaacacggaccgaaggataactcttcgacctcaactggcgaacctgcctatctaatatggctactggctcctcctcataagtcagatccttgtccaattggacaccgctgaaatcaagaacatgggatggatctacaatatacttacggagcatggatacatgaaacatgggatgcactgcggataaatgcggtggcaaggcaagtctgtaggccacctctcctactttatcttaaacttcaaatgggccaacatacctagggctcaacttgccattctttccgaatctcatcacgcccttcattggcgacactcgaaggaacacccggtctcctaccataaaagacaaatctcgaaccctacgatctgtatagctcttttgtctggactgagttgtacgaagcctatcctaaataatcttcaccttatccaaggcatcctggactaactcagaacccagtaatctagcctctccgggcttaaaccatccgattggagaccgacatttcctaccatacaacgcctcatacggagccatctgaatacttgattggtaactgttgttgtaggcaaactctgctaagggcaagaactggtcccatgaaccaccaaaatcaataacacatgcccgcaacatatcttccaaaacctgaatggtgcgctcggactgtctgtccgtctggggatgaaatgttgtactcaactctatgtgagtgcccaactctctctgaaatactctccagaaataggaggtcaactgagtacctcggtctgatatgatagataggggcacaccgtgtaacttgacaatctctctaatatagatctgagccaacttctctgctgaagatgaaaccgccaccggaatgaaatgtgctgatttggtcagcctatctaccacaacccatacttcatcaaccatcctcggagttcgtgggagtccaactacaaaatccatcgtgaaaggctcctacttccactcgggaagctgaatctgctgcatcaaaccaccgagtctctggtgctaatatttaacctgctgacaattcaagcaccgagccacataagccacgatatccttcttcattctacgccaccaataatgctgccgcaagtcctggtacatcttcgcagcgcgcggatgaatggaatacctggaactgtggacctcctgcaatattgactcacgaattccatcaacatcaggaacacatatgcgaccctgcaatctcaaaactccctcagcatcaactgtgacctgcttggcacgtccgtgccgaaccgcatctctaagagcacacaaatgacgatcctcatactgcctggcgcgaatgcaaccatataatgaagaacgagcgacggtatgggccaaaacactgccaccctcagaaacctccaatctgacaaatcgattggctaacgtctgaacatccaaagccaaaggtcgctctcccactgatagataagccaaactacccatgctgactgacttccggctcaaggcatcggccaccacgttggcctttcctgggtgatagagaatagtaatatcataatattttagcaattctaaccacctcctctgcctcatattcaactcattttgcctaaacaaatattgcaaactcttatgatcagtgaatacctcacacggtaccccatacaaatagtgcctccaaatcttcaaggcatgaacaatagctgcaagctccaaatcatggactggatagttcttttcatgaatcttcaactgacgtgaagcataggctataaccttcccatccagcatcaacactgcaccaagcccaaatctcgaagcatcacaatacacagtataagaacctgaacatgtgggcagcaccaacactggtgcggtggtcaaactgtcttgagcttctgaaagctcacttcacattcctccgaccatctgaactgaacactcttctgcgtcaacttggtcataggggctcctatagacgaaaacccctccacgaaccggcgataatagcctgctaggcccaagaaactccgaatctctgtggttgtacgcctaggccaatctctgactgctgaaactttcttcggatccacctgaataccctctgccgataccacgtggcccagaaatgccaccgaactcagccagaactcacacttggaaaatttggcatacaactgactatccctcagagtctggaggacgactcgaaggtgctgctcatgctctgctcggctgcgagagtataccaaaatatcatctataaacacgatcaaaaaggagtccagataaggcctgaatacccgattcatcaactccatgaaagctgcggggacattaatcaacccgaacgacatgaccaagaactcataatgcccataacgagtgcgaaaagctgtcttaggcacatcagaagccctaatccttagctgatgataaccaaacctcaagtctattttagagaacaccgtagcaccctgaagctgatcaaataaatcatcaatcctcggcaaaggatacttgttcttgacagtaaccttattgaactgccggtagtcaatacccatcctcatcgagccatctttcttcttcatgaacaatactggagcaccccaaggtgaaacactaggcctgatgaagcctttacccaacaaaacctacaattgctcctttaattccttcaattttggcagagccatacgatacgggggaatagaaatgggttgagtgccctcagctagctcgatacaaaaatcaatatccctgtcgggtggcatacccggcaggtcagcagggaatacctctggaaattcacgaaccatgggcacggactctatggaaggaacatcagcactagaatcacgaacacaggccagataagccaaacaacctttctcgaccatgcgccgagcctttatataagaaataacgctgccagaagaacgactaggagtccccctccactctaaacgaggcacacctggtaaggccaaggtcactgtcttggcatgacagtccatgatagcatgatacggagataggcaatccatccctaatataacatcaaagtcaaccatatcaagaagcaaatgatcaacctgagtctccagaccaccaatagctactacgcaagcacggtaaactcgatctaccactatagaatcacccaccggtgtagacacatgtacaacaatacccaaggagtcacggggcatactcaaattaggggcaaagtatgaagacacataggagaatgcagaacctggatcaaataacaccgaagcctctcggctgcaaactgaaactgtacatgtgataactgcatcagaagcctcagcatctagacgagcaggaaaagcataacaccggggctgagcccctccaacatgtatatctctaggtctacctgccacgggctgacctctacctctcatggcctgtcctccacctctatgagtctgaccaccacctctggcaccacgaccaccacccctagctggctgagggggtgagggtgcacctgatgcgggaaccatggcacgggaaccctgatactgagacccaccaaaacctcggaggaaaaacctggaaatatgccccataccaccgcaagtgaaacaagaccttggctgctgagaataccgaccctggaactgaccctgtcgaccagaatgaccaccctgatagctctcaatcggcggtgcactgatggaagctgcaggtgcactgcgggatacctggagtgctgactgataaggcctaggaggatggcctctgccaaatgaatctctgcatccagatgaggcaccactgaaatggccgaaatgacgaggtctcttgtcagacccctgaccaccaccctgggataataccatctcaatgcgcttggcaacatcggctgcatcctggaaggagatatcagtacccgtctctctggccatctgaagcctgatgggctgagccagaccctcaataaacaactgaaccctctcccgatcagtggggagtatcataagagcatgcatggccagcgtaataaacctggtctcgtactgagtgacggacatggagccctgctgtagacgctcaaactgcctccgaagatcctctatctgagtaactggaaggaacttcccgaagaacaactcggagaactgaccccaattagagagagtaaaatagaagcacgcgtcctcgccatctgcgagagagtaaaatagagactcaattagcattcagaattcaattagcacgacagagaatgaaagatgtgaagttattcctaactttgcagtctctgggggataattacacacgtctccgtaccaatccctcagactctaccaagtttgtccgtgagttgtgagacctaagcaacctagggctctgataccaacttgtcacgacccgaaattccaccttcgggccatggctgcatctaacggtgaacccgccagacaagccaacgttaactaaatatataactcattaacgactgaaacgagcaaattaactagggcatcgttggccccaaatatgaaatttagcaaataacccaaaatataacatagcatattcgaaatacaacccatacacaaaatcccagaactggtgtcacacattcacggactatctaagagattactacaaacaaaaggtcttaaataaatacataagaatgtctttgaaatacaaggtaagacagagctgaaagtggaaagtagaaggtgacgtcaaggcccaagaacgtctgcgggtctacctcgagtctcctgtgtgactgaatgagatgctccgatcgttagtgatctccgggtccggctgcgtagtctacacaacataaagaagtgcaggtgtagcatcagtacaaccgaccccatgtactgagtaagtgtcgagcctaacctcggcgaagtagtgacgaggctaggaccaacactacatacgtacctatgcaattttatataatagcaggaaaaatggcaactaaaataagcaactaagacagatacgaggagaacatgctagggagatagggtaatagtatgctaacacagcagtacaaggtaataaatgaaacgtaaagacaaggtagaaatatagcgtctcaaacatataatgaacaggaaaggcacgacttgtcccctcgtgcataacctcacagtcactcggcacagaatgtcccctcgtgcaaatataataacactcggcacggaatgtcccctcgtgcataacctcacaatcactcggcacggaatgtcccctcgtgcatatataataacactcggcacggaatgtcccctcgtgcataacctcacaatcactcggcacagaatgtcccctcgtgcatatataataacaatcggcacggaatgtcccctcgtgcatatataataacactcggcacagaatgtcccctcgtgcataacctcacaatcactcggcacagaatgtcccctcgtgcatatataataacactcagtcaacacggcaagtcccctcgtgcgacgaataataaaaaaacacaaggcaacaataatgtgaaaatcaacaatacgaagtctcaagtgcatggaaatattcaatacaattcccttgtcccagcaaggaaaattcatcaattacaatatcaacaaatgcccgacaagggtctcagttattaccaacctcgcatcagaaatacaatttcaacagtgtaagcctcaactggaacaaataactcaataactctccacgtcatgaaacaacatcaagtatcacttttaattcataatttactcatagtgcggggaatattaggaacatagcaaaatttcatcacaattgactcacgggcatacttgaccgcaacgcataggcactcgtcaccacgcctatacgttggacatgagttgcacataacaaataagactctatacctaatccctcaagcttaggttaagccaaacacttacctcggctccaaaattgcaagtcaagcctcgatcacagccttttctttagaatccgactccggaacggtattatctagacataatcaacccaagtatatcaataatggctcaataaatcaaacacatagcctaattatttatttcaaagcattcttcctaagattccgaaatttgaccctgggcccgcttggtccaaacacgaggctcggaccaaaacccgatcacccataaccccacgagttagaatatatgacttgtgttaagattcgaccccaaatggaggttgaattactcaaaattctaaaaatccaactttacctagaatccttaattcctacctaaatttccatgtttttaggcctagaatctagtgattagttgatgcaattaagagaaaatgatgataagaacacttacctagggagctatggaggttggggagcttgattctcggttatggaggtttggggaagaagggggaagtgaaaaatgggagtgactcgtaatgggtctgtttttggggttaaaaatataactaggcgtttttaatgttatgcgatcgcggaacatgaggtgcgatcgcatagaggtgagttgcttaagctctgcgatcgcagaggcccttgtgcgatcgcacagggcaattctaaccagccccaggccctatgctaacctctgtgcgttcgcagcaccccacatgcgttcgcacagtattaaccctggaccctccacgatcgcgccctttgaggtgcgttcgcactgaacaactaacccccaacccccttcctacctattacactatgcgatcgcggagaagcaagtgcgatcgcatagtgcatcataccccatcacatgccaatgctatgcgatcgcagggaggaatctgcgattgcactgaagaaggtattagacaccagaaaactggaggaacaccagagtttttcctactttttgcactccgatgcctacccgaaactcacccgagccctcggggctcaaaaccaattacacacacaacctcatacacatcctacggacttgtgcaaataattaaaccaccaaaatacatcaaaaacagggaattaaactccaaaaccaaattaatcaaacttaagaactttgaatttctagaattcacctcaacgcgccgaaccggcctaaaccactcggaatgacttcaaattttgcagataagttatgaatgacacactggaactattctcggtctcggaattttattccgacctcgggaacataaactcacctctcaagccaaattttaaattctttagaaaccccacaagttcattaactccatttttcccctcatttggatccgaaaccaaccaaatcaagcccgttttacaccaaattccacagataggacaaattacatataaaaaacctgttctgggctgcggaaccgcaatacgggcccggcaacacggtttttacataattattcattttcaaagcctttattattttcagaaaacaattttctttaaaaattcatttctcgggcttgggacctcgaaattcgattccggtcatacgcccgggtcccatattttcctacggaccctccaggaccgtcacatcacgggtccggatccgtttaccaataatgttgaccaaagtcaactttattcaattattcaattattcaattcaaaaatctcatttttatgaaattttcacatgaaagtttcccggctacctgcccgggctgtgcacgcatatcgaggtgatattaacggaggctttcgaggccttaaaacacagatttagctggaattactcaggatgaccttttgggtcatcacaccagttctgggatttgtttatgggttttatttcgaaaagtgctatgttgtattttgggttattttgttaaattttatatggtaggccatcgaagccttggttatcttattcgtatttgttgttaataagttttatttagttcaaacattggcttgtctagcgggttcaacgttagacgcagtcatggcccgaaggtgggatttttgggtcgtgacaagtaaaatatgagactggggcgtatgctgggaaatgaattccgaggtcccaagccttagaaatcaatttttgaaagaaattattttgctgaaatattaatgaaataaagaaaagaattaatgtttgaaaccattggtatcagacccgtattttggttcttgagcttgatacatatttgttatagtatttaagggttaactgtgtaatttggtgaaaaatggagtttatttgacatgattcgaacatccagttaaaaagttatgaactttaagtgttcttgaggaaaatgatgagttctgaggtttaattcatagttttacatgttattttcatgatttgatcgcacgagcaagtccgtatgatatttctagacttgcgtgcatattttgtttagagccccgagggctcgggtgagtttcggataggccacgagatgtttttgcacttgaattttctgctgtctttgttgttgctggtgcacaactatttaatgcattgcgttcgcacccctatgaacgtgaacacgcagagtaaaataggtgggggtcattttgctctttgcgaatgcggttggtcccgcgagcgcatagagttagtgggcctgggggagtcgcctggctttccttctacgcgaacgcactgccttgatcgcgaatgcggaggcccaaggagctaaagctccgcttacgcggccccttcactgcgatcgcataggtccgggccaggactctatgcgaacgcagccctgcttttgcgaacgcatagaagtcttgcccgggcgtatataaactcttttaaaaaccggacagacttcatcttcttcatattttcaaccctcacagccctaggagaaaattgcttcaccaaatatcatccccaaattgttggtaatcaattctaaaccttactctttcaatttcttattatttttcatcacttttaaatcaaaaactaagaattttcatggtaaaaactgagggtttgggtagaattagagaattttataaaaatcaaatttttacctcgtattgaggtcggatttcgaaactaattgcatattcgggttcgtgggtgaatgggtaaacgtaatttggtccgataccccgagtttagaccaagcgggcccggggtcgggttttcactttttttattgaaaacttaggaaaaactataatttttaataaagttagttcctttagccttaattaatgatattaagttaattatgattagattcgagcaagttagagcaagattctaaaggaaaagctgtaattgagcagtgagtggcctacgaaattgaggtaagtgcttggtttaaccttgacttgagggaataagagtccccaacttatttgttatgtgaatttgcatgtgtgtggtgtataggtgaggtgacgagtatctatgcaccaccaaattatctgttaaacgtgatcccttccatgtttccaatttaattgattcatgtcttaattgttctatgttcattatcgtttctatgactactaggccttatgaacttgctgttaaatattgttgtggttattttggcagagtattggttacttatttggttcccttgtggtacagaaaggttgagcagtttggcatttttatgagatgtatatatatttatgcttctgttggtttcttgttgttgtgataatatttggggagtttatgagatatatagtttcatgtttaccattgttgagataaaagtgttgtgaaagtattgatacataaataaattgatagtgataagggtggacaattgatagttataagggtggtaaatatgatagagataagggtggacagcggaaataaatgatagtgataaggatggtcatgtgggatcggattgaacgccgcaacaagacagtgataagggagaataattatgttttattgattttaattacaaagaattgaaaattcttgttttactctacggtttttctcatgttctgtacatgtggttattttaaagtaaagtttgaaaatttagaaatttatttgaggattggttatagttgagacctggaaaaggtgactgagttattttaaattgttgttgcagttgttattatttacttgttttagatttctttcttgctttattatttattattgttacatgttatattgttaatgccctgccgtagcctcgtcactacttcgtcgaggttaggcttggcacttactcagtacatgaggtcggttgtactaatactacactctgcactcttttgtgcagatccaggtaccggccaacagtagagatatctagagaagctacctattttattccggagacacgaggtatatctgtcggcgttcgcagatcccgagagtcttctctatattacttagactactattttatttgattcaaaacagttacatattatttctttcagcccattatttgtagtattctttagtagttcgtgaattgtgacaccagaccctgggtagtttttgagttatatatataattagttagtggctcagtttatttaattgtttattcgtttatatttggaatcatttattaaaaccattaaatttagtttactttagattacttttttatgtttaaatgaataatttaggcaaaatagttaatcgaattctaacattgtcttgcttagcaagtgtggtgttaggcgtcatcacgatccctaaggttgggaatttgggtcgtgacagttcatagtgacatttgtgacctgtgtgtcaaatatgaggtcattcggactagtttggacgtggttcaacatcgtttgtagatattggaaaaattctaagttcttaggcttgaattcatgtttaactcttgtttttggtgttatgtgatgtggtttgaaggcttgactaagttcgaatgaggctataggattgattggcagttttggttggggtcccgggggcctcaggtgagtttcagatgccaaatggatgagaatttggacttaggcaaatctgatgtgggccgtttctggtgttttcgcatctgcggatgttggaccgcaggcgcggccccatagaagcaaaagagaagtcgcaggtgtggttttgggcattagggccagtggtcgcaaatgcggctcgaggactgtagaagcggagctacatctgcgaagaaagcaccggagatgtagagttggaggaattagtgatttccacaaatgcggagccctggatgcagaagtggactgtaggtgcggacctgggagcgcaggtgcgagcatcgctgggcagaattaggcaattttgagggttggaagttcattacaccaaattcgatttctagctcgggaatatgcaattttgagaggatttcgaagaggagatcagtaggtaatgattcctaatcctatttcacttgtatttcgtcaatctatagtaagttcttcaatctaattaatgaatttgttggaaaaagtttaaaaatggaagaaaagttccccaattgaaaatcagagaattttatgggattttgacgtcggattttgatgattcttgttcgagtgtgttagtgaatgagtgtgtgttcataatttgtacattttacctgattccgagtcgtaggcccgaaggactttttgggggcaattttcctaatttcgctatttagctttgaattgattagttaaattagttacttaaagttatatttacattatgcaattgaattggatagattttggccatttggagtcgagtacttgcggcatgagcacggtatcgagttgatttgagaagtcgaggtaagtggcttgcctaactctgtgttggggacttccccttaggatgttttgacataaattgttgtgtgggcgccgtgtacgtgaggtgacgagtacgtacacatgccattttttcaaaaatttcccttttttccttcgaaaattataaattgtttttctcctattacattgctttaatgtgttaaattgtttatcttagattaagaaaggatgcttgcatttttaaatattaaattgtctatctgtcactctgtgcgccatgcttagttagtttattgcttttccttacctgtgataagatgaactgtataaattgatgccttacttgtctttcatttcgcatcacatatttaaattgggacttacatattctgggagatcctcctgtactgcatatttaaattgggactacaaacgtattccaggagattcccatgtactgcatatttaaattgggactacgaacgtattctggaagatcccccaacactgcatatttattttgggactacggacgtattccaagagatccccctgtactgcataatcatttggaaccacgggacggtatcccaggagattccactttgtgttacattgttctgagtcgagggttctctttactgttaaatttttgaatatttttatttaactgtttactgtagaaattacttatcttttgaactgctttacattgattttatttaatccagtaaagccttaacctgaccttgttactacttgaccagggttaggcttggtacttactgggtaccaaatgtggtgtactcatgcccttttctgcacatatttttcgtgtgcagatccaggtacgagttgttagtcgcgtagctagttgttgatgttgtttccaggagaccacaaggtacgtccacagaatcctccgagtcccttctattctatcttatagatattttcctatgtactttccagttttgtttagagccacagtagtatagaagcttctgactatattgtgtcaatccgggtctatgggatttatatttttgtacatgccgagtggcatcgttatgattattcagattttgtccttaattttctttatttatcgtctttttaattaagttttatctgcaaattaggcttacctagtcgtagggactaggtgccgttacaatacctttcggagggtaatttgggtcgtgacaaataccctatagcctctcgaagataagtacaaatgtctctgttttgatctgcaagactctatttggtctgctcattactcgtgaagcatgtatgaacctggtcctttgatactaagttgtcacgaccaatttccccataggacattatggctcccaatgccgtcgacaggcaagctaaataaaatcaacacaacgattgatattttaaaattcgttttaaatcaagtagtgaaataaataaccggatttttttagaaatcatgataaaataccaacatcttcaccaagatacgaagtatgaacaaaataataacctgaatgtcataacaactctacaaccataataactgtctaaaatccccaaaagtcggcgccacaagtgcatgagcctctactaggatatataaaaatacgacaactactgcctggaattaaaagtaggaagaatacaatagaaagaaggagactctttgtgctgcgggtcgaacatagaaggcaactcaccactaagtctactaacaagtgtggctatgcgcccgtgtgaccacctgaagtaccagtcctagtacctacataattagtacgaaaatatagtatgagtatgtaaattaatacgtaaccagtaagtatctagtctaacctcgaagaagtagtggcgagggtcgacatcgacacttattagtggtccaataatcaatgtacataaaatacagtagacaagtaagagacatggcaagtagcaacaaaataggtaaatatatacaaaatgtattttaatcaaaataaataggtatgaatccgtcaatatactcaattatgtacaaactacctttcgagatatttcacataatagagtgaggtgaatggtccggtcctataagaatggtgttacacaatcctgtcagggcgaacgaccttatcccataagaatagtattacatgatactgtcaaggtgaatggcctgatccaataagagtattacatgatactaacgaggcaaacgagccgatcctacaagagtattgctaaggcgaaaaacacaattcaaaaaaatagtattttataatactgacgaggcgaacgacccggttccattcaatggatcactagcccaacccacgaagttacgtgcgagtttaagtagtaatgaaactaccaaacaaataagaaaaacacgaggatatgtactcaagatatggcacaactccaccgatattcaagtatcccaccaaattttataaagtaacaaggttcgataaactacgcaattctagtctcaagccaagtcgggaattcgagtatttaaatacacaagattaaatcaagtagtaccgttaaagcataatataagtctaagtctatccggacatatcaagaatctagcatacacacagactccattaagaaaattttagttgtgttagccttccatctgattttcttcttctcttctccttcctcttcttttgcatcttcttcttctgctgcttcatccttatgcatcttcttcttcttattattattattattattatgagcgcacaactaaatttttaacaaaataataaaatatttattgtaagaaattaaagattcattatttatttctgattagaattgagtgggtaatgccattgagcttatattatctatatttaatgatttagattgatttggctagagaaaattaaaaaacaccatttgaataaaaacttattaaaatagacaaagtggatgtattgatttttgaaggtttaagatgaataaaaccaatgaaattgttgaaattgatatctaaaggttgtatatcaaatgtcatttagagctgatttagatcaattttgaagcaaaatatgattgataaaatttatgtacaataattatggtaatcgttcgaatttgtggtcaaatataacagttatcaagatttttgcaaatcaattatagtaatggtcataatttatgactatttattacaatgggttagaaattctaaccatcgccataggctaagaaatgctaatgagcatgtattatatagaccaaatgttatttttcaagatttggcaccaaatgatcctatttgtgcaaatgacccctattgaactaggaaaatttataaatagtcatttttacgcctagtcaatcaaatttagccacataatcaaaagtcaactatatttagccactaaattagcatgggaataatttattgactaaaataaccctactctatttataaaatttatgcgacatgacctcatactctgtttcagcagaatcatgtagcgtcaatctacagattgaagtaagcctcacaattattcttctgattcttcgaatgttctagtttgatcttcttattcttctcaatgcgttaatctacaatgcttctcgtttgcagaccgtaactaataatatttgcattgctattattattatttcaattactttatgttgtcactaaacatcgaaaatgtctagttcattaaaaaacacacagttaaagtgttggcagatgaattaattgcagaacgaaacatccagtataatatacttgacatttttgaatagatatattagacttacaaacttccagattattatacggagagtatgtatgattcaaacaccacaaatatatctaaatatttaagattcatctactatcctgaataaaaagatagaattttgtcattagtgttacgacccaatttctcctataggtcgtgatggtgcccaacgttatcgctagtaaagcaaatagtgaactaactttgtgatcttttcttttagaaattttgaaatagttggtttttagtctgtacataaatcggagataagaatttaacaaaacaagagagtaaacttttgaaatcaagagaaatagataaaataacccaaaatcattaagtgtctactagcataaatcactaagaccggtgtcacaaatatatgggctaccagtagaatatataaaagattattactctactatctgaaatgaaacagacagaacaataaataaaaaaagactccagctgctgcagatcggctcggaaggcatctcatcaagtagtctcttaacaaggatcaagtgtgcgcgccagactgatatccagatgcacctgcctcaaatcctgtacattaggcgcagaagtgtagcgtgagtacataaacaacatatacccgataagtatccaatctaacttcgaagaggtagtgacgaggtgttgactttgacacttactatgggctaataataaagtgtcaaaatttttgttaagcatggattacataaatataactgaaaactcaacaacaggaaataataagcagtcctctcgctaataataaatcccaagtttatttccatcatttaacaatttatatctcaagccaatgaagcaatatcaatttcaataacagataattccaaagattcattatacacaatcatgtcgaggtcgtacgacccgatacaacataaaaatatctaaattgtgcactaccaagggtcgaacgacacaaaccatagatgcatctatatgctaccgatgcgtttggtccgctccccaaaataaaatactttaaagaaatacaaattcgcaataacagtcaagtgacccatccacaacttcaagaaagtgaaatttaatcttttacaatttctttatcaagtttcaatatgacttaagcaattaagttaacaggtagagtgcaaacattgtaagtatagcatgatatgggtcttagactacccggattagcataattagtagccacgtatggactcgcatcacctcgtgcgtacgtagcccccacaaataggagcacatattaatcaatttacctatggggttaattccctcttacaagatagaaaagagacttatctcgtctcaaagcctactttccggtccaagattgtgctcaaaccctcaattctatgctaaacgactcaaaactagtcaaatgttatataaatttatcaatacatgttcaaaagttcatatgctaataattaaagtgattacccaaccccaaatgtaggattcctaaaatttacccacgggcccggattccagaaattttcgaacaaagttgtttcccataacctcatgaactcaaatatatgactttcactaaattccataacaatttcatggttaaatctcatttttatcaaaaaactaggtttacacctaaactcatgatattcactaatgtacatgttataatatacccataagctatgtgtttaactcacattcagtaggaattacttacctcaattagttgatgaaaatctctctctaaccagctccaaaatctgtgatgacccaagggatcattttctgaaatcagacctaattctaggcttactagccataaaaagactaattttaattacctcgaattgtgtgtgcagtccgtgcgtaaaaccggaaagcttccatgtgaaagtatgaaaaatagtaatttctagagttaaaatttggttttagttgactctggtcaatatttttggtaaacggacccggatctgtgttcggacgatcccgggaggtctgcagaaaaatatgggacttgggcatatgactggaattgaatttccaggtccctagccttagaaataatttttgaagaaaattgttctgctggttaattcaagaaataaagaaatgaaataatatgtgaaattgatgataccgggcccgtattttagttatggagcgcggaacaagttcgttatgttatttaagtcctatctatgaaatttcatgagaaacggagttgatttgatgtaattcggatatccggttgaaaagttggaaatttgagtgttcttgaggaaatcttgagttttgaggttaaatctgtagatgttgatgttattttgatgatttgatagcacgagcaagtccgatgatatttttagacttgcgtgcatgtttggtttggaggcccgagggctcgggtgagtttcgggtaggctatggagtgtctacacttagaaaaaaataccaaacaactgaacatctggtgttgcaagcctcagatctcgcaaatgtgagatcgagcttcgcatttgcaaagtcaatggccagtttcagatctcacatttgcgatattttgggtcgcaaatgcgaagcacccttagtcgcaaaggcgacatttttatcgcatttgcgataatttccgaaaaactcagggttcgcaaatgcgaactccaattcgcaaatgcgagacccgcaacctgttatatcagatttttgacggttttttttacttctttttcaattctctcaaaccctaaacctccatagacaattttagaaagacccaaacctcaccaaaccattggtaagtgatctccaactaattattttcaattcctaacaacttgtaacaagattacaaccaaaattctagagttttcatggtaaaaattggggttttgggtagaacttaggaatttcaaaatttggggaattggacctcgaattgaggtcggattccaaaaccaattgcatatccgagctcgggggagattgggtaaacaagttttggtccgaacctcgagtttagaccaagcgggtccggggttgatttttgaatttgtttaagaaaacgtaggagaaccattatttttcaatgaagttgattcttgtaggctatgattgataacattaaaccaattgtgattagattcgagcggattagaagcaaattctaaaggaaaggaagtactagagcagtgaattgcttgtgagatcgaggtaagttcttggtttaaccttgacttgagggaataggaatacctaacctgattgttatgtgaaattgcttgtgtgtggtgtataggtgaggtgacgagtactatgcactactaaattggttgtttaacatgatcccttccccgtttcccatttatttgcttcttggcttaactgttttatgatcattgaggtttacatggctatttggttccatgaaattattgtcaagtactgttgcaagtgtgttaaaagtgttggctgatcccttgattttgttatggtacataaagattgagctggatgacagcgttacggtatttacatatgttctggcaggtttcattgtgaaatgatatttgataaagcttatgagttataccgttttcagtttacaattgttgagacaaaagtgttgtgaaaggcttggcctgaattgtgaaagttttcataaataaataaactgatatgatatgtctggtaggagcgggttgcacgccgcaacaaggagtgataagggtggactggtgggatcgggtttcacaccgcaataggtgtaataagggtggaatatagggagatgtaataagggtggacaggtgggagcgggttgcacgccgcaacaaggagcaataagggaggacacctatgtttttactgattttccaagaaaaagcaaagaattgaaaaattattgttttactttactatttttcgtattttacacttactattattttaaaagtcaaaacatgaaaatttatgagagattttggttatagttgaggcctggaaagaggcaactgaattattttatttattgttacaagtttattgttcttgtttcgtttagaattgtttttcttgttttgtgttatatatatatatatatatatatatatatacactgttacaggttacgttacattgccccgccttagcctcgtcactacttcgtcgaggttaggctcgacagttactcagtatatggggtcgtactgatactacactctgcactcttttgtgcagatccagggaccaatcagcgttaggagatcttagtagccgacatcatccattcggagatgaggtagatctattggcgtccgcagattcctggcgtcttctctcagttttatagatactgttttattacattcgaaacaattacattatttctttcagcccattatttgtagtactcctagtggttcgtgaattgtgacactggaatttggggtagtcttatggttacttatttagttagaggctcggtttaattattcgtttattattattcgtggatttatgcaatggaagaaataaattttagtttattttgaattgttttgttatagttaaataaactttaatgtaaattaattaaataagttctaacattggcttgccaagcaagtgtggtgttaggcgccatcacgatctctaaggttaggaatttgggtcgtgacaagttggtatcagagcactaggttgcttaagtctaacaattcacgaacaagcttaatagagtttgaaggatcggtacggagacgtctgtacttatctctcagacgctatcgagttaggaaacaactccatttttatttctcttctattgtgtgattcttgttatctcaaatactaatttggactcttctattctctcgcagatggcgagaacccgtgcttcctcttccgttgaccaatcattcggtcctccagtagcagcaacaactcctattaggggcagaggccgaggccacatcagaggatgaggcaggggcaatacataacccgttgctcagacagaagccccagctgcggaaccctaagttgagatacatgagggagttccagcgggaccagctcaggtcccaaaggggtttattgcctccctagttcttcaggacgctttggtccggttagtgggcatcatggagagtgtagcccagactggaacattccccgtggcagcgaccacatttcaggctggaggagggattcatacccctgttactcatactcctgatcagaccactcctcaggttcaaaccccagcggctaatccagttaggggtaattcagccagttgctgcagtgccacatgtttatggggcaactatgtccatcgattctttatggagtttggacatgttcattaagttatttcttgttcatttcagtggtgagacttcagaggatcctcaagaatatctggatagttgtcataaggttttgtgtaatatgggtattttggagacaaatagggtcgatttcgctgcttttcagatgactggttccgccaagaaatgatggagggattatctgtggactagaccagttaggtcgcttgccttgacttgggatcaattttctcatctctttttggagaagtttttgcctattactacccgagaggagaagcgtcgtcagtttgagctacttcagcaggggagcatgaatgtcacctagtatgacaatcattttgtagatttgactaggcatgccattctcttgttgcccacagagagagagagagagagggtcagacggtttattgagggccttgctcagcctatcaggttgcagatggctaaggaaacaagtaccaagatttcttttcaggatgcggaaaatgtggccaggagggttgagtcggttcttgggatgggaggtcaggggtcagacaagcgacctcgccatcctgggggattcagtggtgccacgtctggaggcgggattcatttagcaaatgccagtgttccaggccatttcactcagcacttcaggtctcacatggtacttcaggtggtcgtggttcttaatgccttcttctgctcagccagtttacagtgcttcttcagctcctattagagcacctcctctatggagttattatcagggtcagccggtttgtcagggtcagtcttcgtattaggtgggatgttttgagtctggtgaatatgagcatgttcgtaggatttgttcgaaatatgcaggtaatcagcttcaacatcagggttctcgtgctatagtttctccaccagctccagtaccgcctacctagccagccaggggtagaggtcaggtagcttgaggtgggggtcaggttgtgagaggtggaggtcatgttgctagaggtggaggccagtccgctagaggtgaaggtccacctatctaaggtcctcctagagacgtagttcagggtggcggggcccagccccaattatatgcatttccagccaggcctgaggcggagtcctctgatgctgttattataggtattatctcagtttgcgatagagatgcttcagttttgtttgatccagggtctacttattcttatgtttcatcgtattttgccccgtatttggttgtgccccgtgtccttgagtgttcctgtttatgtgtctacattggtgggggatgctatcatggtagatcgtgtttatcgttcgtgcgtaataatcattgatggtcttgaaactagtgtagatctcttgcttcttgacatggtcgattttgattttatattacgcatggattggttgtcaccgtattatgccattttatattgtcacgccaagacagttactctagccttgccagggttgcctcgattagagtggaaatggactcctggtcattctcccagcaaagtgatttcttatatcaaggctcgtcgtatggttgaaaaggggtgtttggcctatttagctcatattcatgactctgaggccgaggttccttctatagattcggtgcctatcagtcgtgagtttctcgaggtgtttcctgcagacctatcggggatgccacctaatagggatattgatttttgtattgatgtagctccgagcactcagcccatttccattcttccatatcagatggccccaccagaattgaaagaattgaaagatcagttgcaagacttgtttgataaagattttatcagacccactttctcgccttagggtgcaccggtcttgtttgtgaaaaaaaaggatgggtcgataaggatgtgtatagactaccggtagttgaatagagtaactatcaagaataaatatccattgccgaggattgatgatttatttgatcagcttcaaggtgccagtgtgttttcaaaaattgatctgagatctagttaccatcagctgaagattagggcgtccgatgttcctaagacagtctttcggacgagatatgggcactacgaaattttggtgatgtcctttggtttgaccaatgctccagcagacttcatggacttgatgaatcggtttttcaagcctcatctggactcttttataattgtattcattgatgacattatgatatattcccgtagccgtgaggagcatgaacaacacctctgtatagcactccagactttgagggataatcagttatatgccaagtttcaaaatgtgagttctggttagattcagtagctttcttgggtcatattgtatcagcagagtgtatccgggtagatcctaagaagatagaggcagtaaagaactggcctggacccaccacagccacagaaattataagcttcttgggtttggcaggctatttaccgtcgctttgtggaggtgttttcatctatagcagctctaatgaccaaattgactcataaaggtgctctattcaaatggtcggatgagtgtggggcgagcttccagaagttcaagacagccttgactttagcactagtgttggtgttaccatcaggttcaggttctttcacggtttattgtgatgcttcccgagttggacttggggcagtattgatgcaggttggcagggtgattgcatatgagtctcgtcagaaaactcatgagaagaattatcctgttcatgacttagaattggcagccattgttcatgcattaaagatttggaggcactatctctatggcgtgtcgtgtgaggttttcactgaccatcgtagtctccagtacctgttcaagaaaaaagacctaaatttgaggcaacagagatggttggagttactgaaggactatgatgtcactatattatatcatcctgggaaggccaatgtggtggttgatgcgttgagtaggaagtcggtgagtatgggcagccttgcatttattccagttggggagagaccgttggcttcagatgttcaaactttggctaatcagtttgtgaggttggatattttatccggcagtgttttagcttgtacagtcgctcggtcttgtttaatcaagtgtatccgagagcgacagaatgatgacccacatttgatagttcttagggacacagttcggcacgacggtgcaaagaaggttcagttggagatgacagtgttttgaggatgcaaggtcgcatatgtgtacctaatgttgatggacttcgtgagttgattcttgaggaagctcatagttctaagtattttattcacccaggtgcagccaaaatgtaccaggacttgaggcagcattattggtggagaaggatgaaaaaggatattgttgcttatgtggctcattgtttgaatttccagcaggtaaaatacgagcatcagcgacatagtggtttgcttcaacagatagagattcctaagtggaagtgggggcgtatcactatggacttcgttgttggactcccacgggctcagaggaagtttgacacagtttgtgttattgtggataggctgactaaatttgcgcatttcattccagtggcaagtacttatacttcggagaggttggctgaaatatatattcaggagattgtttgccttcacggtgtgcccatgtctatcatttctgatcggggtatacagtttacctcacacttttggagagcagttcatcgtgggttaggtacccgagttgagttgagcacaacatttcatcctcagacggatgggcagtccgagcgtactactcgattttagaggatattctccgcgcttgtgtaattgactttggaggttcttgggatcagttcttgccgttagcagagtttgcctataataatagttgtcagtcgagcattcagatggctccctatgaggcattatatggtagacaatgtagatcgccagttggatggtttgagcctggagaagctcggttattgggtacaaatttagtgcaggaggccttagaaaaggtcaagattattcaagagcgacttcgtgcagtttagtctaggtaaaagtgttatgccgatcataaggttagagatgtggcattcttggttggagagagagtattgctgcgggtatcgcccatgaaaggtgttatgagatttggaaagaagggtaagttgagccctaggtatatcgggccatttgagattcttgagagagtgggggaggtagcttataaacttgcattgcctctagggttatcctcagttcatcaggtattccatgtgtctatgctccagaaatatcatggtgaccagtcccacgtgttagatttcagctctgtccaattggacaaatacttaacttatgaggagaagccgatggccattttagaccgccaagttcgtcaattgaggtcgaagagttatcctttagttcgagtgcaatggaaaggtcagcccgttgaggcagttacttgggagtccgagtcagacatgcagagtaaatatccacacttgttttccaattcaggtaattttctatgtccgttcgaggacgcacaaatgttttagatgtgcagattgtgatgacccaaggggtcattttctaaaatcatacctaattcttggcttactatccataaaaagactaattttaattacatcgaattgtgtgtgtagttcaggcgtgaaaccgaaaagcttttatgtgaatatatgaaaatagtaatttctagagttaaaatttggttttagttgactctggtcaacatttttggtaaaaagacctgtatctgtgttctgacaatccagggaggtccgcagtaaagtatgagacttgggcgtatgcccggaattgaattccgaggtccctagcctcagaaattaatttttgaataaaattgttccactggttaattaaagaaataaagaaatgaaataatatgtgaaattgatgataccgggtccgtattttagttatggagcccgacacaagttcgttatgttatttaagtcctatctatgaaatttcatgagaaacggagttgatttgaggtaattcggacatccggttgaaaagttggaaatttgagtgttcttgaggaaatcttgagttttgaggttaaatctatatgttttgatgttattttgatgattttatagcacgatcaagtccgtatgatgtttttagacttgcgtgcatgtctggtttggagttctgagggctcaggtgagtttcgattaggctacgcagtctagacttagaaaatatacccaacaactgaacatttggtgttgcaggacttagatctcgcaaatgcgagatcaggcttcgcatttgcgaagtcaatggccagcctcaaatctcgcatttgcgagattttgggtcgcaaatgcgacatttttatcgcatttgcgataatttccagaaaactcaaggttcgcaagtgcgaactccagttcgcaactgcgagacacgcaacctgttatatcagatttttgacgggtttttcacttcttattcaattctctcaaaccctaaacctccatagacgattttccaaagatgcaaacttctccaaaccaatggtaagtgatgtccaactaattattttcaattcctaacaacttttaacaaggttacaaccaaagttctagagttttcatggtaaaaactgggtttttgggtagaacttaggaatttcaaaatttggggaattggacctcgaattgaggtcggattccaaaaccaattgcatatctgggctcgggggagattgggtaaacgggttttggtccgaaccccgagtttagaccaagcgggttcggggtcgatttttgaatttggataagaaaacataggagaaccattatttttcaataaagtttattcttgtaggctatgattgataacattgaaccaattgtgattagattcgagcggactagaagcaaatgctaaaggaaaggaagtgctagagcagtgatttgcttgtgagatcgaggtaagttcttggtttaaccttgacttgagggaataggaatcgccaacctgattgttatgtgaaattgcttgtgtgtggtgtataggtgaggtggcgagtacctatgcattactaaaatggttgtttaacatgatcccttcctcgtttcccatttatttgcttcctggcttaactgttttatgatcaatgaggtttacatggctatttggttccatgaaatatttgtcaagtattgttgcaagtgtgttcggacgatctcgggaggtctgcagtaaaatatgggacttgggcatatgactggaattgaatttccaggtccctagccttagaaaataatttttgaagaaaactgttctgctagttaattcaataaataaagaaatgaaataatatgtgaaattgatgataccgggtccgtattttagttatggagcccgacacaagttcgttatgttatttaagtcctatctatgaaatttcatgagaaacggagttgatttgaggtaattcggacatccggtggaaaagttggaaatttgagtgttcttgaggaaatcttgagttttgaggttaaatctgtagatgttgatgttattttgatgatttgatagcacgagcaggtccgatgatatttttagacttgagtgcatgtttggtttggaggcccgagggctcgggtgagtttcgggtaggctacggagtgtctacacttagaaaaaataccaaacagctgaacatctggtgttgtaggcctcagatctcgcaaatgtgagatcgagcttcgcatttgcgaagtcaatggccagtctcagatctcacatttgcgatattttgggtcacaaatgcgaagcacccttagtcgcaaaggcgacatttttatcgcatttgcgataatttccgaagagcttagtctcatgcaaatgaaggcagagattatccttatgcaaatggaggcagagattaaccttatgcagaggaaggcaaagattatccttatgcagatgtggaggcaaagcttaacctcatgcaagtggaaggaagagattagccttatgcaagatgaaggcatcgattagccttatgcaaggggaaggcagagattagccttatgcagagggaaggcagagattagccttatgcagaggagggcagagattagccttatgcagaggaaggcagatattatccttatgcaaatgaaggcagcgattagccttatgcaaggggaaggcagagattagccttatgcaagatggagacagagcttagtctcatgcaggggaaggcaacattgagccttatgaaaagaaagacagggattagccttatgcaaggtgaaggcagagattagccttatgcaaagtgaaggcagagattagccttatgcaaagtgaaggctgagattagccttatgcaaagaagggcagagattagccttatgcaaggtgaatgcagagattagccttatgcaagtatagaggtagagcttaacctcatgcaaatgcgggaatgggcttagtcccatgcaggtgaaggcagagattagccttatgcaaaagatagagtaaatagtagatggtatcagagtttcttagctggtagaagatttcgatattgtgattgtggtgaaaacttatgacttcgaggcgcatatattctttattcctacatccaaacaaaaattgtgagttttgtaagaagaggttggtccacgtccccgctggctttgcttgtctcgctttgattcgtctggagatcccgtttaagtcatcaggatagcgtttggctaaatagagttaccttacaagcaagcatgcatagttttgtaaagatatagtaaaaaatatattttaagaaatttagatgaaccaatgaccgtgacaagttcccagacattgcaacctctcgtgctatggaattttgagggtcctcctcaaaattctgccccagttagatggattggcatctttaactgctatacatgatgcgatcggctgaacttgcttcggaattttgagggtcctcctcaaaattcttccccaatttctgattgcgaggggaaatgatatttttattgaattatgaccgaacccatagggctgcctacgtatcccctcttaaacaggaatcaggttgagcgtagttaaatttacatcctttgagaaaagcataaaaagttacacatagtatcatttgactgtatctgagttgatcggttttggccagacttctttgtccatttctacaagtataagagctcctcctgtctgtactctatgaaccatgcaagggtcgtgctagttgggagagaatttccctttggcctcattttgatgtggaaagatcttcttcaacaccagttgccccggtgtgaactgtctaggcttgactcttttgttgaaggctctggtcattctgttctgataaagttatccgtgacacactacattaattattttccggtctatgaggactagttgctcataacggctccttatccattctgcgtcgctgagctcaacttcttgtatgattctcaaggaaggaatctccacttcggcaagaataacagcttccgtaccataaaccagcaagtagggagttgcctcggttgatgtgcggactgtggtgcggtatcccaataaggcaaatgacagcttttcgtgccactgttttgtgattttctaccatctttctcagtatcttcttgatattcttgttatcggcttctacaactccattcatctgaggtctataggctgtagaattcttgtgcttgattttaaaagtctcgcacatggccttcattaggtcactgttgagattggaagcattgtcggtgatgattgactctggaactccgaatcgacaagcaatacggtcgcggacaaagtctgccacgactttcttagtcactattttgtaggatgctgcttcaacccatttggtaaagtaatcaatagctaccaagatgaaccggtgcccattcgaggcggtgggcttgattggaccgatgacatccattccccaggagacgaacgaccaaggtgaccttgttgcattgatctcgtttggggaaccttaatcatatctgtgtgtatctaacactggtagcatttccgaacatattggatgcagtccgttcccatggtcatccagaaataaccggctctgagtatcttcttggccaaaacaaaactattcatatgcggcatgtcccaaaatgtacctcttcaagtagtttagaagcttcctttacatcgacacatctcagtaatcccaaatcaggagttctcctgtacaagattcctccactgtgaaagaaactagtggataacctccgaagcgtacgtttctgggtatgatttgcatgctccaggtattctccctttgccaaatattccttgatgtcatggaaccaaggtttcccatatgcttcttcttcaacatgcgcacaatatgccggttggctatggatctttaccggaatagggtcaatgaagttcttttctggatgctgtatcatggatgataaagtggccagtgcatcggcgaactcgttcaagatcctaggaacatgccgaaattctgtcttcatgaacctctttctcaattcttgcacatggtgcagatatggaaatatcttgaagttattggtagcccattctccttgtacttggtgtataagaaaatcagagtcaccaattaccagcaactcctgaatattcatgtcgatggatatgttgagccctaatatgcaagcttcatattctaccatattgttagtgcagggaaatatgagtttagcagatacaggataatgttggccagtttccgataccaagactgctccaatccgactccttttaaattcgttgctccatcaaagaacatcctccaactgttataggattcaacaatatcttctcctatcaacagtacttctttttcgggaaaatacattttcaggggttcgtattctcctcccacagggtttttagcaagatgatctgccaatgcctgtcccttgaccgctttctaagttacataaatgatgtcgaaatcactcggcaggatctgccacttagctagcttgccggtgggagagggcttctgaaagatgtacttcaagggatccattcttgatatgaggtatgttgtgtaggcacaaaagtagtgtcttaacttttgagctacccaggtcagagagcaacaggtacgttctagcagagagtaccgtgcctcatatggagtgaactccttacttagataatagataggttgttcttttcttcctgtctcgtcgtgctgccacaaaaggcagccgaaagctccatctagtactgcaaggtagagtaataaggttctacctggctctagcggtaccaagactggtggtgtcgataagtactccttgattctgtcgaaggccttttgacaatccttggtctatttggttgcagcgtctttctttaacatcttgaagattggttcacatatgactgtagactgtgctatgaatcggctgatgtaatttagccgtcctagaaaacacattacgtccttcttatttctcgatgctggcaactcctggatggatttgacttttgatggatccagttctattcctcggcggctgatgatgagaccaagcaattttccggcaggaaccccgaatgcacattttgtggggtttaatttcaagttgtatttccgcagtctgttgaagaatttccttatatatactatatggtcggtggctttcttggacttgatgatgacgttatccatatatacctcgatctccttatgtatcatatcatggaagatagtggtcatagccctcatgtaagtggccccaacattctttagaccgaatgccatcatcttataacaatacactccccacggcataatgaaagatgttttctcagcgtctttctcgtccatctaaatctgatggtaaccggcgaaacaatccacaaatgactagagttcatgtttggcacaattgtcaattaggatgtgtatgtttggaagagggaaatcatcctttgggatggctcggttgatatcccgacattcaaaacaaaccctaacctttccatccttcttaggcactggcacggtgttggctaaccatgttgggtattcaaccaccctgaggaccttggcgttgatttgtttagtgaccccctccttgattttcaaactcatatcgggcttgaacttccggagtttctgcttgactggtggcgcattggattcgtgggcaatttgtgagccacaatggatgtacttagtccagtcatattatcgtatgaccatgcaaatatgtcttgatattccttcaagaattgtgtgtactcttctttctcatagtcttccacctctctgacaatttcgtcgggtatgatatcttcttcttcttccgaatcactatccttttgttgcgttgcctcattgcatgtcacattcattggttcatcaagacaggaaatagtaatgctgtatgataataataaatatcaattcattgaagcataaaaatgattttcaatatcttaaacaaacgtttttggaacatcggagattttatttaaaaatagaaatgtgaaaaggaaatcattagcaaatgaaataaacaatgattgttcagccttgctaccccgagactcgtcgggccctagatggtctgacaatccagtttctaaggaatgatcccttgctcacggcttggatggtagggccttcctcctcctcctcctcctcctcgacaataacacaacagtccatgtctccgtcttccaggaataagttcctcatggctgctaatgcttcctcctcctctgatccccatatgatgtcagcttgttggaaagtttgttccaagtgtggtatgggcctctccaatggataataaggatcgcgccatggtggcgtccaatttacgtattcttgccgagatccttgccgggtttgtatccgctccaattcagtatgctttcaatcttactactccaccatttgtcctcgtctatcgcattgacccgctcgatgtgatgatatgtttctccaccaagccttcttctaccctcaactaccgggatagtgtggcggttgtagataggattgctctcatatccatagataataacctcctgatggttccactcaaactttacctcctgatgcaaagtcgatgccacagccccgacggcgtgtatccatgtgtcacgccccaaaacctaaggacggaaccggtgcctaactgaatgaacccagtctagcaagcctgatttgcctttcctacccgacgcgtctccccgtgtttatagcatatattattcatatgaaatagcgagagaaaatcaaaagcgtggattcacaacataaagtccatttttttcccctttaacgttttaacattagatcttaccaaaacatacatactaagtacaacattcccgatacggaaccacgattacgagtaagtacaacaactacccaaaatatatgtacaacccacgtaatgtctacggagcctctatgagtatgaagaagtgtacataaacttgccggcaacaaggccccgactatacctcaaaagagacaacatacacaaataagagaacaacggcaatcggcgctacctgctacagaaccacctacatccatataaaagatgtaacgccccccggcaaaaaggacgttagtaccattgaatagtactagtatatatgaacaaacctactatagataggataaacatcaacagttaaagatacacataaagacatcatacaacaattcaccaaagcaagggaagacacaaacaagaatttccgtatcccttatcccgttttgccatcttttggattgtgttcttttaagttttatcttgttattattattattactgatccatcgtgtcgttgtcacatggatcctgatctttgcccgatcggataagccatcctaggtgaggtccgaatatcatcacatctcatatcaccaccgtggcttgttcacacggagtccgatctctgcccgaatcggctaggctaacaccgtgaaatgtgcactgcacacggagtctgatatctgcccgatcgtctaggccatctcaactgaaacagtgaggaaaataatcatcatcatcatatcacaatatcaagtcatccatgtgtacggcatggagtccgatcccagcccgatcagataggccatctcagccctaggacattcttctggtcaattcatggatattttagatcactttgatcatttttaacctttttgatccccaacacatatcattatttgattcatctttcatatcattagaatcctttgattcatatttcacaacaatcaatcctttaatccatattccataacaatccaatccattacttcatgtctcatatcaattcctgttgattcgtatttcatatcattaccatatctttactcacacttcatatcattacaactttttgattcatatttcataccattccaatctttcacatttaccacacccatcatatacaaggatcgcacacatattataagaagcaacataatgatcacaactcatatactcaagtagcacaacgatatggtaataacatggaatgacatagaagcaagaatttctcaattaggcacatagaacacataaattccatagatatccaacaagagaatcatacccggaaagtgaacacaatgggattatcctatgaggattagagttatccatacatacctcgaatcgggatttttccttaatttctttctcaaatcatcggaccttctagcaccttcaatctaattcacaatgcgacacatttaaacttagaattaggaatcatgaacatgtcttgaactcatttgagctttctatcaaacactaggtgttcctttagattaaataacccctttttagtgaaaggttactccaacctattttcctttactagattaagataaattgggtacatgcatgcaagattcttaactccatctttatgaactatcctacccatgtttcattgtaacaaaaatctggaaattaagcttaatggggtagaagcttacctcttagagtgaagaaatttgtgtcctacttgattagttccaagcttgagtgatgaaggaggatcaatttaatgaagctgggagtttctctctctagaacccactctttcctctctctaatatattagaaaataagcttaaaatgatgaggaatgggttttatatgggtccggggtcgggttataaagatagaaaaatggatagtccaacatttcggacctggctttatccaggctttatctacctaaagtctggtctggcctggctttacccgggtgttatctacctaaagcctggtctgacctggctttacccgggctttatctaaagcctggtctggcctggcctggctttatccaagctttatctacctaaagcctggtttggcctggctttatccaggatttatctacctaatgcctggtctagctgcgacgaaaatgtttcaactcctcagcgcatcgttcaatcccaaaaactccggaagtacaatgcattacctaccttgacaccacaaaaccttaaattacttaacgatgtatggggccctacattagacctctccttggaccccacaatacttagtttatgacttatgcacttatttaccaaatccaattagtttatatcatatttatagcacaaaagtattataattagcacacctggcacctcgaaatcctaaaaattacttagcaaaattttccggggccttacattctcccccgactaggatcattcgtcctcgaatgaggatcaatgattcactaagttttgaatatactatatgtcaacccccaaatttaaccaactcccaatgtttctgaaaaattgtgctagagtttcctttgtaattagacctatccacctgtcagagagcccccgaaatacacttcaacgaattccacataatttagttacttcaacgaattacacataatgtaacgacccagccggtcgtttcgtgtgttgggactccgttcccgtgaatgactcttcccatagcgactactcgtgccttttgacttgtgtgggcaggtagtttgagattcaaaagtgatttggccagttcaggaacacttggttcctgaaggctagcctatttggctgattttggttccgagcagcattttgaacaaacgacctcagaatcgagttctgacagctccagcagctccggatgatgatttcggacttgggagtgtgttcgccccgggtttctgatgacccgggagtatttcggcacctgaattagaattcaggatttcatgtgatttggaattcaacctggaattggacctcgtgatatcatggtccgaatggaattccggaactgacaatagttccgtatagtaatttatgacttgtacgcaaaatttggggtcattccgtgcagtgtagacctgttcggcgtattgatgagccatttgaattttttcttgaaatcctaagtttgatctaaggggttttggagagtgattcttggtttgaatgatgtttttagtgttctgggagctcgagcaagtccgtcatatgaatagggacttgttggtataatttgtcgagggctcgggtgggcctaggggtctcccggaccccgatcggggtcaaaaaccagcaaaactcatagttggtgggaatgtactggtgtgaccgcacctgcggtccatgagccgcaggcacgaggttagcaccagcggaaattccttcgcaggtgcgtccccttccgcaggagcggccttctctctgcaggcgcggacaaaagcccgcaggcgcgactttccccaggggcccaggccatcgcgggtgcggacaaattcccgcaagtgcgagtccgtacctgcgatccaatgtccgcaggtgcgagaaatcccccagtgcccaggccgttttccgcaggcgcgaccctttattccgcaggtgcgaggccgcacctcgtgatttctttcccaaaaatcatatttcctcaattgttgacgatcccaagagctccagaacgggtatttcggcctagaaactcaggtaagtgattccgtaacactccgcatgtcaatttcttccgttctttgagaatttcctcttcctaattcataggaattcataagaaattgttggggagaatagagggttttgatgaatatgtgaattctgatttttgggccatggagggatggttaattgagttaatcttgatccttaggtgacgtatagcgctttccttcaagaattatattttttcggacgccgaggctcggagttgaatttccaaagtatgtcaagaatacatttttgaggaaatatttgataaatcctccttgaatcttcctaaattgatataattatgtgcttttggctagttgcgagccatcgagggtgattcggaggattcgtgcgtcttgttaattggtccgttgaccggaggagtacttgtctaggtgagtctcctttccaaactttgtaagggggaaatgtcccctaggctcttgattactaattatgctcgttgagggggctacgtacgtaccacgtgacgagagtccgtacgtggcatctatactgtatatcgggtagccgtaggacccacgagcatgttctaattgttgtttgatattatctgatgtattgtacaagtttttactgatatttgatgaaattgagctgtgatagctgcgaatttaatgtacataatattcagataagaattatgaactctatcaatttagtaattgtgttactcctgatataattgaaattgagctggatgaaggtggttaaaatttccttcttgtacttgaattgttccatcatggtaatattgtgagcaaagaggataatatgataaaaattctaactttgtctataaagtgagatgtgagtatccgatcccattgagtgtgggcgagtcggtaccacggtgtctaaatatacctatatatatacgcattcatggcccccgagtcacatgtatgattcatgatcggggagaacttatattttcattgcccctgcgtcacaggtttgattcgtgatcagggaggaatttcacttatatttttaccagcccctgagtcacaggtttgattcgtgatcagggaggaattacacttatattttactaactcctgagtcacaggtttgatacgtgatcagggagagatcagacctattttactagcccctcagtcacaggtttgattcgtgattagggagaattatactactaatttcattggcccccgagtcacaagtatgattcgtgatcggggaggacttatattttctttggcccccgagacacaggcatgattcgtgatcagggagagttttactttgcatcattggccccgagtcacaggtatgattcgtgatcgggagattatatatatacgtcattggcccctgagtcgcatgaatgattcgcgagcagggagagatatttgcccacgagtcgcatggatgattcacgatcgtggagattttatcgagtcagcgcacgagtcgcaggtatgattcgcgagcgtgtggagctttatgaccgagtcagtccttatgacccacctttatgactttggccgatagtcttgtccgtgtcggttatatacatatatgtatacatacgtaagcattgcattgagttgggatcgtacgatggtgagttgagaaacggtattgagtactggaaagtgaacaattgaggtaataagataagacatttcagataatgagaaaagaaacaagtgatacctataatcactttacaaagagaggttgtgttaagatcagttacatgtttgttgattacatgtccttacttgatgtattttctcacatgatttactgctcagcatgtaccttatttatttatttatgtactggaccttagtgagtatgtattctacctctcgtcattactctttacgagtttatacgggatactcactgggtacatatttgtttatatgtactcatgctgcactttctttctttttctgcacttgactgtgcaggtatggaggctggttcgtctgttcgtccgtcagctgataggtactgatcgcggcgtcgctccacacggtgagctgtcttcttggcgttttcctgacagcacctctggagcttcccagtttcatttttgctcagtctttttttccagactgcggcttgtatattttgtatatgtatttctgctgttgtatctatgtagccgcccattgacactgtgacactagtcctggcacacactgttgtagttatcggggttgtatgtactgggcctagctgtggttcagcttgttttctacggccttatcccatgttgttattgtattccgcattttcatttttgttgttgttcgttggcttgcctgacctcgccgttaggcgccatcacgaccttgaccagttttgggtcgtgacagagtggtatcagagcgcttaggttcacatagtctcacaagtcacgggcgaacttagtagagtcctgcggatcggtacggagacgtctgtacttatcttcgggaggctatagagtgttaggaaactccttttgttcaaagtctatcgtgcagttggccttatactcaatttgttcttctattctctcacagatggtgaggacacgggcttctcatgttcctaattagggggaggatgctacccctgccgctcgaggacgaggtcgaggcactcggggtagggctcctgctggtaggagggggcgagggagtcccagagctacaacagctgcaccagtacattgatgagcaggaggagctacctccagtagcaccacctccagtggactttatgacggcaccaggcttccaggaggtcatgggccgcatgctgagattcatcgacacaatgtcgcaggcaggcatccttcacattagatcctgccacctctcaagcaggagggggagttcagacccctacagctcagactacaggaccacatcgtactccagatattccgccggttattagggctcagcctgggttagaggcatcaggatccaggccagttccgagaggggatcaacataagttattgggtagatggacacagctacaccctccggtctttgggggtgagcagggagaggatgcccaggattttctagagaggtacagggacaggctgcacaacatgggtatattggagtctcatggggttgatttcacttccttccagttttagggcagagctcttcggtggtggcagtcgtatttgctgggcaggccaaccggttctctgccagtcacttgggatcagttctcccagctattcctggataggtacattcctccatctgagagggaagacttgcgggctcagttcgagagactggagcaggggcacttgttagtgaaagattatgaggccagattttcagagctgtctcgtcatgccatcatgatactacctacagatggcgagaaagtttgtcggtttgtagtaggtttgcatcctggcatcaagacttctttagctagagaggtggagatgggcactccatttcagacagtggttgagatagctcgtcgtatagagggctatcgagtcagggataggagtcggggccagtcagggcaacagggacaacatgacaagagagctagattcaccggggacttcagaggtgcatcaggaagggtcaggggtcagtttgctagcggtcagtccagtcggtcttcctattcggcatcttcagtacctgccagggtggctccagtcaggccacagttcagtgccatgccggatgtcactccagccatccagggttctcagtcctcgggtcagtaggatatgtcctagatgaagtgttatcggtgcggagacatgggccacgtgaggagaatttgcctcaattataaaggcacggcagtgcagcagagccatcaacccaaggtcccaacaccagcagattgaccaccgaggggtggagctcagattggcaggggccgccccagagggggaggccagccgggtagaggtcattcagctccagctcgatctgggggagctcagccatcaggcacctcagcacatttctatgccatcccagccagggtagacgcagtagcctcagatgcagtgattacaggtaccatttcagtctgtggtagggaggcttcagtgttatttgatccggtctccacatactcttatgtttcagctttattttctcattctctagatattgtatgtgagtccttgggatctcctttgtatgtgtctactcctgtgggcgactctatggtggtagactgggtctaccgggcttgtgtggtttttctatgattttgagaccagagccgacctattattgctcgatatggttgatttcaaggttattttgggcatggattggttatcccctcatcatgtcgtcttggattattatgccaagaccgttacattagccatgcccgagtcgccgaggttagagtggagaggtgtctcaattagtgctttcaaccgagttatttctttcataaaggctcgacacatggttgagaaagggtgtctagcctatcttgcttatgtgcgggacactaccgccgagtctcctactgttgattcaatacctgtcgtccgtgagttttcggatgtgtttccctcagattttccaggcatgcctccagaccgggatattgatttctgcattgatctagcaccaggtactcagcctatatctattcctccttatcgtatggctcctaaggagctaaaggagttgaaggagcagctagaggagttattggccaagggtttcatcaggcctagtgtgtcgccgtggggtgctcctgtgcttttcgtgaaaaagaaagatgggtctttgcgtatgtgtattgactatcgccagctgaacaaggtaactatcaagaataagtatcctctacctcgcattgatgatttatttgatcaacttcagggtgggcgtgtgttctccaagattgacttgagatcggggtatcaccagttaaggattcagacttcttatgttccgaagactgcattccgcaccagatatggacactatgagttcttggtgatgtcttttggcttgactaatgccccatcagcttttatggatttgatgaatagggtattcaggtcttatattgactcgtttgttattgttttcattgatgagcagcatttgtgggtagtgcttcagaccttgcgagagcagaaattatatgctaaattctccaagtgtgagttctggttagagtccgtagcattcttgggccatatagtgagggtattaaggttgatccatagaagattgaggcagttcagggttggcctcgtcctacttcagctacggagatcaggagtattctgggtttggcaggttattactgtcgttttgtcgagggattttcttctattgctgctccattgactagattgactcagaagaatgccccatttcagtggtccgatgattgtgaggcgagctttcagaagctcaaatcagctttgatatcagcaccagttctttcattaccttctgagtcaaggacctatacggtatattgcgacgtttcacgcgtcgggttgggatgtgttttgatgcaggatggcagagttattgcttatgcttcgcgacagttgaaggttcatgagaagaactaccctgttcatgatttggagttggtagagatcgttcatgctttgaaaatatggcggcattacctgtatggtgtatcttgtgaggtctatacggaccaccgcagtttacagtatttgcttaagcagagagatcttaatttgaggcagcggaggtggcttgagttgttgaaagactatgaccttaccattttgtatcatccgggcaaggcaaatgtggtagcggatgctatgagcaggcgtacaaccagcatggggagtttagcctatatttcagttgaggaaaggcctttagccttggacattcagtccttggccaatcagttagtgagattagatctttcagagcctcatcgagtcttggcacatgtggtagctcagtcttccttgcttggggagatcaggactcgacagtttgatgacccgcttctagcagagctccgggatactgtgattcagggcctggccaaggatgttaccttaggcaaggacggtgttttgagactgcagggcaggctgtgtgttccagatgttcatggtttgagggagagaattctagcagaggctcacagttccaggtattctatccatccaggggtgacaaaaatgtatcgtgatttgaagcagcatttctggtggaggcggatgaagaaagatattgttcagtatgtagctcgatgtcttaattgccagcaagttaagtacgagcatcagcggccaggtggtttatttcagcagatgcccattccccagtggaagtgggagcgcattaccatggactttgtgtcaggattacctcggattttgcggaaggttgacaatataaagtcatccatgtgtacgacatggagtccgatcccagcccgatcggataggccatctcacccctaggacattctcctggtcaattcatggatattttatatcactttgatcagttttaacatttttgatcccccaacacatatcattctttgattcatctttcatatcattggaatcctttgattcatatttcacagcaatctatcctttaatccatattccataacaatccaatccagtaattcatgtctcatatcaattcaatctcttgattcgtatttcatatcattaccatctctttactctcacttcatatcattacaactttttgattcatatttcataccatttcaatctttcaaatttaccacaccatcatatacaaggatcgcacacatagtagaagaaggaacataatgatcacaactcatatactaaagtagcacaacgatatggtaatagcatggaacgacatacaagcaagaatttctcaattaggcacatagaacacataaattccatagatatccaacaagagaatcatacccggaaagtgaacacaatgggcttatcctatgaggattagagttagccacacatacctcgaatcgggatttttccttaatttctatatcaaatcaccggaccttctagcaccttcaatctaattcacaatgcggcacatttaaacactaggtgttcctttagattaaataacccctttttagtgaaaggttactccaacctattttcctttactagattatgataaactgggtacatgcatgaaagattcttaaccccatctttatgaactatcctacccatgtttcattttaacaaaaatctagaaattgaggttaatggggtagaagcttacctcttagagtgaagaaatttatgtcctacttgattagttccaagcttgagtgatgaaggaggatcaatttgatgaagttgggactttctctctctataacccactttttcctctctataatatatcagaaaataagcttaaaatgatgaggaatgggttttatatgggtctggggttgggttataaagatagaaaaatggatagtccaacatttcagacctggctttatccatgctttatctacctaaagcctggtctggcctggctttaatcgggctttatttacctaaatcatggtttggcttggctttatccaggctttatctacctaaagcctggtctggcctggctttatccaggctttatctacctaattcttggtctagctgcgacaaaaaaatttcaactcctcagcgcatcgttcaatcccaaaactccataagtagaatgcattaccttccttgacaccacaaaaccttaaattacttagcgaagttttttcccggggccctacattaggcctctccttggacccacaaatccaatttgtttatatcctatttatagcacaaaaatattataattagcccacctggcacctcgaaatcctaaattacttagcaaaattttccggggccttacaccatggtcgtcccagtagtagattataggacgcggatatatccaacacttaaaattcgacctcaaaccatgtaagtcccatttgtagacatagactgatttctccaatggtggatctttgagaaccatcgaaagccttcacattcatggacccctctcgtatcttgtacagacctttgcccaacctttttagtgttgtcaatgggaaaatgttaaggatggaccccccatcgatcagaaccctagtgataaagtaatcttcgtaatgtacagtgccctgttgtgactcaaaccttcaggtggcaattcgtcctcatggaaggtaatcttgtggctttctaatacctgccctaccatgttgttgtccatctctccgcttgtgatgttattaggcacatatgcttcgatcaatactttcatcaaatcattcctgtgtgttttcgagttctgcagcaatgataggatggatatctgggctagggttttgttcagttgatctatgactgaatattccttggcttgcaccttcctccaaaggtcatctgacctgtttcaatgacgggaggtctgttggaatcctgtttgctagactctgccaagtgctcgggtgtatagaccatgccggtcctggtcatcccctgtgcagcaccaacttcatctatcttgacctttccgttccttctagcctcaactatgtaataccaggtcacaacattagcgttgaaaggtggcgtggtcgacactatcactgtgattggtggggccacccttacttcaaatggggtagatgccgtggtaggtggcattacttcaacctcaaatggaacaggcgtgtctgcaggtgatgccacttcaaactcgaacgggattgttgtggttgcttcaccctctgatggctggatctgtactataatagggttaagtgtgaccgctggcttcttcgggacatcaccttctttgatcaacccgatcgaccattctgggtcccattcttcatctatttctatcacatttatgcctccacctctgtggtctgggagtggtttattgcggacattaggagtagcctcattttcctggatgattttattatcaattagagactagattttatccttcaacgagcgacattcatcaatggtatgtcccttcatgccggaatggtttgcacatgttttgtttggattgacccactaggatagattttcaggggtcatagcagggatagcggtaacgtaaccagcaacttttagcctttcatacaactggtcaatgtgatcggtaatggcggtatattgtttgggcggcctgcggtcaaagttgggtcgaggtctcgggaaagtttggcgagctggaggtgactagaagtgagacggtagggagttgtgagtttgatagacaatggctggttgggaatatctgggagatgtaggttgatatgtaggtggaggtgatggttgatatgttagtggaggtgctggatgatatgtaggtgggggtgcttggtatgcaagtggagaggtatgatacatcagtggagatttgggtccctgtgcaaccattaccgttcctgcgtctttcttcttagatatgccaccggattgcaaggatttattggtggcttgcagtgcctcaaaattagcgaccattccactcttgataccttcttcgattctttccccaagcttgatgatgtcggagaatttgtgattttcaatcaccatcagtctctcataatattgcgggtcttgtgccctgatgaagaatttgttcatttgttcttcttctagtgcagtcctgaccttggctacttctgacctccaacgagtggcatactcgcgaaaggtttcagtgggtttctttttgaggttctgtatgtaaaacacgtctagtgcattttccatattgaacctaaatcggtccatgaaatctgatgccatgctcacccaattgaaccacttctcaggctcttggctgatgtaccaagacaaagcatcctctgtgaggctcctcatgaataatatcatacgaattttctcgtctcttcccactccaccaatttgtcacaataggtcctcagatggaccctgggatcaccagtaccgtcgaacatctcgaacttgggaggtttgtgttacaccccatgttttcgtacgtgagactacatcgtaagtcaattgatgtaagctcagaaataagattctatttgatggaatataaagtaagttaatcatgttacgttggaggttacaaatatttaagatcaagaataacgagtaccaagagggttggaaagtttagaatctaaaccaactgaagagaataagtttcgtcaaaagtcgacgagtttggaatgttataacatgtactttagggtgatactatggttaattaaattataaaaaggttatgctatgagttaattttttcatatgatagtcgtgtgctacattttgaagtcaagcaagtttaggaacagaagttggaataggtcttcacaagttacattcataaatttgttgaaacttaggttgaatgtagctgcacttttctccctatatacttataatcaggggattatctacctatcaaattgaagctctacaagtctagtttgcaattcattaaaccgttcatcgatacaacgtaggagtagagagatattttaggtttcgcgagactacgcagacatatatgacaagtaggtggatcactagagctttttgagaaatagatttcatgtgttatatgaggtcatattgggacatattatataccaaattgaaggtcttggaatttagtttccaactctcttaaccgttagttcatacgacatcgggataaaacgatataagcgtcggaagatggaccaatcctagggtgccaagctagcacctctttgactttttccaaaatagatatatatgtgtcttaggtcggctttctcttcatatttcagaataaaacgagcagagaatacccataaacataaactcaagctatatactagggtttcaaagaagaatgtcatcccgggcatgaaatcgagaagcaataacatcaaaacaatccctacgacgtaagtgtcattataccgcctcttaatttttctttgtagttagagttttggaagttacttcatggttaagaaacgtataatatctgtatttaagtgcttaaatatcaaggaaggttgataaatgtgtttcctaatagttagaactcacgggacggtgatcggaagccgcgagttcgagttatttgacttgtagcggactgttttgtgttgttgttgggatgcgtgttttaatactgttttgtggagttttggaggaggaagggtgtggagaaacaccatatagatgtagggttgtgagctggtcattcgttgtaatagttccgggtcgtttgacacgactacggtggtcgtcttatgtgtgaagtgattaggctgtgtgtggacaattttgggaggctcaatatgattattattgatgttgtttgggctgttaggttattgttttgacttgtgtgaagtcatataaataggggaggtgctgtccgtttcatcgtaaaataggttgtggtcgatacataatagttatgacgcttaaacgataacgatagtgtcatttctcttattgtagtttaagaagttgtgacatttgcgtagcttgaggttgggacagtatatacaaggtatgtgaggctatccctttccttcttttgcacgactcctattgtacataatgcaatgaacgagcttccaaagatactctactcttagaagctagcaatacttacattgtttcccttcttatggaacaattgatgttgaggtttcttctcttattcttattctcaatgttgttggtacttcctgattcttataagattcacgatgaatagttagccctaatgatgtgtacggagaatatcgaccttacgtcactccgaaatgttcagaacatgattccaatgagtcctgcatgcattatatatatatatatatatgtatctattttactctaccgagccgcgctatagtcggtagggtatacacctattgtgcaaccactgatcagttgggtttaccgagtcctctttgaggtcgagtatgatatgataatgatgatgcccacagaggtgaatgttctatgatgatgatgatgcccacagaggcggatgttttaaaagattatgtatatatatgtatcatgaatttcatgttactgtttcttagaagcactcagatgttacaggttgtatcttctctacttctctttacattattgttcatatttatattgaccaaccttacatactcagtactttatccgtactgacgtccttttatttgtggacgatgcatgtcgtgctgcaggtcctgatagacaagtagacacagctcccctaccataataggctttccagttcagcggtcataggcgagatcccttctccggacttgccgtggtcttggtatgcatttttttttatagatattatgggtatgtcggggccctgttccggcaatgttgcattatttatgctcctttagaggctcatagacatgtgtcaactcatgtatagtttggtatgccttgttggataatttttgttgtatagtctttcatgacagcgttgtagctcgtaccttttatgtagtttcttagcaatcttgtcatcccatgtgatgtatgtgcatgatccatatctaccatttatattgatctcgttatcccataaagataataagaaggttagataaaatgtacgttggtgctcggcaagtatggcccgggtgttagtcatgatcctccagtttgggtcgtgacaaacttggtatcagagcgggtctgtcctaggggttgtctatgagccgtgtctagtagagtcttgtttatgggtgtgttgtgcaccacacttataagcaagaggctacagggcatttaggactgttactctttcttcttactctagatcgtgtggtagagctcaatcgtaagaactcaatttcctcaattctatcttatttgtaatacgacaatgcatacatcttgaaagatggatggtaagagattgcaatgtggtcgtggaagagttgagtcagaggaactcaattttgcatcatgcttataatgagtaaatgtgagggcttcagcagatcatgtgtgtactaagatgtgttagtttcttaataaggagctctaaggaaagaatatttatctacccatatggtaaaaaaagaaataagagaatcagaaggtagatacaagttttagcaagtaaaagaagcaagataaagaagggtacgaggtacctagttaacaaatattatcagtatttataattctggcagagaactataagcattttttagttgctttcaacggtaacagagatatctacaattgtccataccaatctcaattatgcccaatgggagctaactaaaataatttaagagaaggataggatatcaggatccagctggggttagagtaaccgaaaattatggataaattgttatcattatttaacttttttgaagggtagtgcagaacatggtaatagttcttatttggagataaccatatggtcactctagaatagaacaatcagatgtgaatactagaatattcagaaatttcagcagataggcactaggatcctagaaaggataaatatttgccctagtatgactctagccgccaaaaaaaaaaaagaaaaaagaagaagaatgttaggcatcttgaagagctagtgatatgaagcagggggagctaaatgtgaaataacgtcatgttaaagtctttataatacggcgatagacaaagatattagcatgagaataagaagagagtaaatgaaacattatgagtaagaggtgataaatgagtaatagcggtaaatcaaaatatggtataatgataaagtctatagtcaagtgaaagaaaaatgagaggagacaggccttgagacaatacaaaagtataagccataaagccataccctcatttccagaaatgagttggtgactcacacgtgattaccataaggaaaagttagatccccctaagtaatagaaataagtacgagatagtaaacaagaaaaaaaaatcaaacatgaattagggatcaaaggaattggtaatagtcgacatcgtttcaaagatagtgtttcgacaataatagaatggacaatagaagaataacctttaaaggtcattcatgaagacggttccctaaagcaagcactaggagcagagttaagcttaagggactaaatgtgccagttataccacgtgtcacccttgtgtgtacgaaattcaattatacctggtgtagaagggttaccgcaaggcgagtaatgtatgtgaagatgtagaaacaaaatgccaaatatgaagaggtaaatatcgaatggtaaaggaagaatgtggtaaaaaggttaaaggaataagattgcatttattcatatcctacagatataatataactccggaacattatgaaagcatgatgttcgggagaatcaataagggtttcgcactcgatgatattgatatataagtgggaaggaacacttgatacataaggatcctgtacaagaggtaagttaagacaaaggacataacccaataggcgttacataaaataaagatctgagagtggaccaatgggtagtcagtagtcgatttaggaagagcctagttatggctagatatgaggatataggcaaatcagtagatcatgcaagataaacgtagtgaaacccagcataggaaattcagtctcttagatacaaatttgtaatcctcgagaaatattcagataggagctggggtagtagaaggtacgatataagtgttacgaaaataaaagagtgtgccacaatggagacaactgaaatttcaattcagaagaaaccctacaagcacaagggcatggaggtaagtaattaacgataatgataggcgagtaagaacatcataaatactgtgggatatacaatgtaataaggtctcagctttataagagctagaatttcttccctaagtactacaacgaaatactagctgagaaaataaggaagcaggcttcaaaataagcatagtgacctaaagtagaaatggtcttgtaacagcagtctcactataatgttgtatgcactccataagaaagtggcacctatcgtagctaatgaacgggaaaaaaatcaatcaaaagttgataattgagatcatatgagttacagggaacccccgtattcatgggcactaagataggccaagtatccatgcagcaagtggcagaatgaccaggaaaagtaattgtttacatttaagacaactgagaaggcgtgaaaggaaatctatggtgctaacatgatgaaaggaaggttatgagtagtataagtagatgtgcgtaggttgcaaggtaaagtatggtagagcaacaaggttttagctaggcaggagtaagggtaataaaatatgagtgagaaggtgacaaaaataggtaatccctcaggattaaaatggtttccatacagttataaaaagctcagtatagcatgagtgaactcaaatgagtttaaaactaggagcatttagaatagatagaatgctaccatggtagtaaagtaagggtgtaattgtgataaatgataagaggatgaagtttagacctttgattgagtaatgattttgagaacaagtatttcatgaactgcacgggattagaatacccccataagatgaatcacattgggatgctatgaaatacagttattgcattatagtatcgtccctaagtggattaggaaaatcacttcatatgttccctgatgatacgcgagccctagtgacgatatattacataagaggtttcaaattatcagtggtagattatagatcaacattaaggtgaatcaacaatagattgatgaaagttccaaagtatgagatgagattaggttgtcagtcttaagatgaacagtaatgaggaagcattagaggacttagatttatacatataggataagcggtgagagaaaaacctggagttgggtggcaagtctccataataataaagcgaagtaagagttatggtatagtatgacctacctagtagtggtaaagccataagcatagaaaattgaggctatgaaacaagatatagcaatagtcgtaagttcaacaaaataccaaataaagaactttagtacacctatagatgcccagagggacatcttgtcatagtacaatatatgttcacgaagtgaatcctaaagataggttaaaagctaacaagaaataaaaaaggagataagagtcgcattggcgcacattcaaggttagaattgtctaggctgcatgaaagaaggtagaaatagttatgatattgaaaggagttcgaccacaagtcgtggtgtgagaaagaggcctaaaggggggaatgttctagcctttggatttattcaccgaacaactccctagatggcaaagacgatattaaattattcgtaagagttattgcttaagatatgaaaaagtgcattagtcaacattcgaggacgaatgttctaaaggggggaatgatgttacaccccatgttttcgtacgtgagagtacatcgtaagtcaattgatgttagctcagaaataagattctatttgatggaatataaagtaagttaatcatgttacgttggaggttacaaatatttaagatcatgaataacgagtaccaaaagggttggaaagtttagaatctaaaccaactgaagagaataagttccgtcaaaagtcgacgagtttggaatgttataacatgtactttagggtgagactgtggttaattaaattataaggaggttatgctatgagttaattttttcatatgatagtcgtgtgctacgttttgaagtcaagcaagttttggattagaagttggaataggtcttcacaagttacattcataaatttgttgaaacttaggtcaaatatagctgcacttttctcccaatatacttataatcagaggattatctatctatcaaatagaatctctacaagtctagtttacaattcattaaaccgttcatcgatacaacgcatgagtagagagatattttaggtttcgcgagactacgcagacatcatatatgacaagtaggtggatcactagagctttttgagaaatagatttcatgtgttatatgagctcatattgggacatattatataccaaattgaaggtcttggaatttagtttccaacgctcttaaccgttagttcatacgacatcgggataaaaagatataagcgtcggaatatggaccaatcctagggtgtcaagctagcacctctttgactttttccaaaatagatatatatgtgtcttaggtcggctttctcttcatatttcagcataaaacaagcagagaatacccataaacataaactcaagctatctactagggtttcaaagaagaatatcatcccgggcatgaaatcgagaagcaataacatcaaaacgatccctacgacgtaagtgtcattataccgcctcttcttttttatttgtagttagagttttggaagttacttcatagttaagaaatgtataatatctgtatttaagtgcttaaatatcaaggaaggttgataaatgtgtttcctaatagttagaactcacgggacggtgatcggaagccgtgagttcgagttatttgacttgtagcggactgttttgtgttgttgttgggctgcgtgttttaatactgttttgtggagttttggaggaggaagggtgtgcagaaacaccatatatatgtagggttgtgagctggtcgttcgttgtaatagtttcgggtcgtttgacacgactacggtggtcgtcttatgtgtgaagtgattaggctatgtgtggactattttgggaggatcaatatgattattattgatgttgtttggtctgttaggtgattgttttgacttgtgtgaagtcatataaataggggaggtgctgtccgtttcatcgtaaaataggttgtggtcgatacataatagttatgacgcttaaacgataacgatattgtcatttctcttattgtagattaagaagttgtgacatttgtgtagcttgaggttgggacagtatatacaaggtatgtgaggctatccctttccttcttttgcatgactccgattgtacataatgcaatgaacgagcttccaaagatactctactcttagaagctagcagtacttacattgtttcccttcttatggagcaattgatgttgaggttgcttctcttattcttattctcaatgttgttggtacttcctgattcttataagattctcgatgaagagttagccctaatgatgtgtacggagaatatcgaccttacgtcacttcgaaatgttcagaacatgattccaatgagtcctgcatgcattatatatatgtatctattttactctaccgagccgcgctatagtcggccgggtatggcacctattgtgcaaccactgatcagtagggtttaccgagtcctctttgaggccgggtatgatatgataatgatgatgcccacagaggcgaatgttctatgatgatgatgatgcccacagaggcggatgttttaaaagattatgtatatatatgtatcatgaatttcatgttactatctcttagaagcactcagatgttacaggttgtatcttctctacctttctttatattattgttcatatttatattgaccaaccttacatactcaatactttatccgtaataacgtccttttatttgtggacgatgcatgtcgtgctgcaggtcctgatagacaggtagacacagctcacttaccataataggctttccagttcaacggtcataggcgagatcccttctccagacttgccgtggtcttggtatgcatttttgttatagatattatgggtatgtcggggccctgttccggcaatgttgcattacttatgctcctttagaggctcatagataggtgtcaactcatgtatagtttggtatgccttgttggataatttttgttgtatagtctttcatgacagcattgtagctcgtaccttttatgtagtttcttagcaatcttctcatcccatgtgatgtatgttcatgatccatatctaccatttatattgatctcgttatcccctaaagataataagaaggttagataaaatgaatgttggtgctcgacaagtatggcccgggtgctagtcatgatcctccagtttgggtcgtgacagtttgtaaccctctggtaatcccacatcaggctgtatgcagagatcttcataattcaatcctttaattcccttacctccttccacgccttgaacttggctagtcaatttcttgagttcttcgaccgagttcttgataaacatatctttctcactggattcaggtgtgtaagagatgggttaggtggagtgaggtagagtctccacgcatatggggttattttgatggcttggtgcttgagcatagaggtggtcgttggtggaattttgtggttcagggatgattggtggggtatttctcggagtgtggaaagtgttttgttggtattgtggtgggatggtttgatttttcggtggagttgtatagtggtgagttgtaggagaattctgtttgttagggggtattctaaggtggtgcggggttgtgagtgtttgggtggttgacatcttgaacactaagtgagaaggaaaagtttgccaagttccgaacatgttcaagctccccttggagtttcaacaacctttgctcgagttgcgatgtagcatcattctggacctgagtaccttgactgtcagaagcttctgtgcgttcaaccggtgttgtgttctctttactgatattactcaattcttccatcatgcctttgcctttgcctctaggtggactaggagggggaaaaggtggagggcccctagatcttgtatggtatgctgatgataccagaatacacgaaccaacctttggggagggggaataatcaagagaaaataaaataaaacaaaaggtagccaagtcagtaaggatcatgagaaaatatatgcattatttaaacacatattgcaggaatgtaaatgtgcgtcctaatttggggaacctcgttgtgcctgaggtaggcctagcgacaagttgatttggagatcttagatgccaaaatgccttatttcattaatataaatagatgaattccaaaaacgataccaagataacaaatagaaaataagtcattaatggcacttggccttattacattgatgaaagcaaaagtaaatctaacctatttggtcccagaaggaccttccccatattcgatattcttgattccaccgaacaaatttcccagctcgcgcagtcccagcagaaggtacgctctagctaggtgtccggcttcattcccctcggcgttctagcactcctcgaccttttgatgattttgccttccagctccagtatacctcgctccatgtattccagttgcttgttggaaaggatagccatctctttccactcctcgatcagcctcttgctggtctcatgtatttcgcggtgctcgttatcgtagatccttttgcgcaactggttgtacttgacctgagcctcaacattctcgcctatgattctactgccttggctgattcccggcctcactaacccatccaagtcattttccaaccatgtcggatagaaaggcgcataccctacatggtacctgtctggttcaatagtattcttctcaatgatgattttgcaatgccacatgtgttgggcttggcacttgtaggggacgtcgtcgtcctggaaattcgctctgaagtgactcatcttatcaaccctcggcacgactttctttcttcctgcttacctcatgactcggagaggaacataaggatatatacctctcaacccgatcaacactaagtgtggtgcatccctggacctgatgataaattcgtctgtcaggaatcactcgaacatccattgtacctgcttctcagtttggttatcaaagaattccacccattccttggcaatttctagctgtgcaaatctgtttggaatataggtcatccgcttggggtgatggaaagcaatgtggcattccaagcccttcgtggaagttcctaacgatattggcccttttgaagatgctctaaaagccacaactacagtaacaggttgcaaccctcaaaatgtttagctcccctttggcaacgctccaaggctcggtaaatatcaactaggatcatagggacaattctgaaggtttgcccgtcgatcccttccatcaaggctcgggttaccatggctaacctggtatccctctttgtcggaaacactatcaagcccggaaagcatacaatgaatacgaataccctacggtggatatgagccagagatgtgatggcaaactcgtcatgataggtacggtatgatttgctgtgaccatatctttcatataagtactcgaagggtatgtaggactgttccagacactccaattcagcatttttcttcaaccccgtcattttcagaaaatctcagcccgtgcggttctcaggtaccaacaactcaggggtttcccaaaccagtccagctagtcctcctatttcttctaacagcggtgtcatttcaatattcccaaagcggaatacaactctttaactattcccaaaataaagtagcgaccttaatcaacatattgtttgactggatgtccaagagagacggtaaattgcccagatacttcttcacgtgtttcttatcactggaggaaaggtcttcccaccagtttaggagcattggtgggatattgctgaccataccgaatcttcggacctcgtgcctcattttctgcaagccaaaaattgttaggcccttacccccgccagactcgactatgattagcatacatgcatttaattctccaaattaatgcacagaacgtgatcgtgtccgttgggattatgaaaaccccggtggacttttggataatgctgtcttaaagggttagagtaaggtttctatggaggtctagactgtacccttaagcggacaacttgagggggaaggcacggaaccatcgactgcaccgctgatcgactggttttatcgcaaataagcctttccgaatttagggggtgatataaataggaagagcgcaaccactcatcaagcgttgctataggatttgtataggcacgagtggaatatgatgttgaacatgattgtgcagcaatagataagcaataaacaacatgttttcatgtatttgcacattatgaaagcggtaaatacaacagttataaataaaagcagttacaaaggaaaataaagaaacatgtcagtttcgttttggaaaaataaatactttggaaataaacaattaattgcacataaaggggaaagggaaagggtgcaggtattaacaaagtaagacacatattcacaaagaggtttgtaatggtaaaaacctagaatctgcagcagagtcgccatgatgtcgcgccttctttttcctctcctttcggatcagtcagggtttttgatactattgggacaactcgtttcattttgggaaaagggatataaggagtttaaagagtcgtcacctaacgaattaaggtacgttagggcacctactattggttacttataacattagttgtataaccagagattgggtaagggcttaaaattacttcaagggaaggtgttaggcacccctcaaagtcagaactgtgggtcccgaccaaacttactttgtgaattaatcaagtagaaaatagacagtctaagcacacataagtagacaaataacagttttagtggatcagcagtctaagcatacatatgtaaaaggataaagggaaatcctaagttgtttatcctataggatcacacctatgcaatgcccggtaatcactcctcaatgaggggctacacgttgcattagcgcacagtcatcatatccttatctacccattatcccaccccttagcggttattaagcgaattttgacttaacgagttctaagcatgctgttacccgtcccttccttgtggttcaggaggagtttaggacctctaaatctgggcagttctagacaaacccctaaggttttaacaaggaaaattctaggcgtcaggtaaataacaagtaggaccagcagatagatgaaagaaacagataagaggctcatgtttacctccacatgtaatgcacataaacaggacgtctcaagacacaaatacaggcagttttaaaggaaatcttaggacaagatgtctaggtgaaccttaatacatagaataggcaatgcttgtttaaacattcagctgcagggccctaatggtttgcctactaattttaaaaaacctgtaaaacttagcagtaagcaatcaaaaatcagttatccagttgtatatagagattatttacctaaggttttcctacgcgtgggactattcataataacaattacaagttattttaaacaatgttgaagttattcaacttacaaacatgctactctaggtgatacaaatctgagagtgaatggattgatactagtttatttagaaatataatatttacgtgagactattttttatgccttttcatggatcagtggcttattgtaattagactaggcgtgttcaaatagatgcaaacagaatcccttagaacatatgtctaaatgcacacaagagtgacagatttatgttgaggttatttattaaccttatagtaggatttctaagtgagaataattatgcaacattaaagcatggattaatcacttgtaatatgtttaagcagtagatgtgaaaccctaagaacatgatatctaatacatattgagcatgattttggatgcaaatggaacacattaaccctaagacatggattctaatgcaaatacacataatgtaagacctacatcatgctttctacccaacaaataaacaatactatacggctaaccccaccccccatttttactagccaccctaatttacaaatgattattacagaccaatggctaaatgaattacataaatgaaaaggaaattaaactatagggatcctgaagcaggcccaaatacatcctgggaataccaggccttccgtatcatcaaatgccaagagtttccatagccaatttcatgtccatgtgtgtcagagttccctaaggacctcaaggaggggcagtgctcacacctagactttcataacaagaactaagtaaatgcagtgcggaagggccagcttcagtgtatcaaagttcagagggatctcaaaagcatcccaagggagtcacacactggagggacagaacctagggacttaagagtaaagtgagagtgcttgacatagttttgaaaaggttttgacaagaaaacaacattgaaatgattcaagaagtaaaggagatttgaaaatgaaccgattagtagtaaaacaacttgaaacaatgtaagcattttggaaattcaataagcagcctgattggctatagaacaaacaagtccatcactactaataacagagttcacacaagggtattgggaattggggacatatagaacacacatagtgaaatatgtaacaacagaagcacaaaaggtttacaagagtttataggattaaggaattggtcatacaactaatggtacagacatcagaacagacaggtgaaaacaaagtcacactagacagaattaaacacgggatcagaatcacttagagatattagatgacttagcaatgcagattaataccagaagctgagtaagtaaataaataatcaaacatacatacatggagtaaagtcaggttgagacatgctagagaggcaagaggcaggttcatagacatgctaataagaattcatataggctagtaactaaacagggtagtccaagcatgctaagtgaaacaatgttttaaacatacaaactacacattaaacaaccaaatagtaagcatgagtaagactggaaatcattgaattgaagcaataacacatagagttttggatttgaaattaaatcaagacataccagttagggagagaaaacaaaaagtataaagcaggtatagtgcaataactagccttggcttacaaccggctagttcagtaagagtagcaagcaacaagaaagagcagaaagctttttaagtgtaacagagagttgttatgaactagtgttcgtgtgttagtgagaataaaagagggtatatatagaagttgagagctagacaaataaggtaaagaatcaattgttcagtaattagggacaattacaaaatcaatcaaacataaatcagtaaagtcttaccttaatgaagggtgtaattcaccaacggtaaagagcaggaaacatttaaggaaagaaaggtcaagtagaacttgggtacatagtagataattagggtaaatacacaaaggttcaattaagaaaataagtagtaagaatcaataaataacacggttaatcagagaataaggtaagaaataattaaaggctatcaaaatatggaaataattgagaaaatcagcacataggtaccatcatagtaaactagggaatcaaagaatcgacataatactgattttaaggaaaataatataggtttccatgaataagcagataaattgagtattaacagaaagaatcgaatctgaaactctaataaagacatactagggtataatcacaagatactctaattaaacgaagcagtaatcatgtgagttaaacacataacaaaatcatgtagcaaataatcaaggacgaacttcagaatccaaacaaagtaccaaaaactgggaattttagcataactagttagggttaaagggaaaattaacaaaatcgattaaaacacataagaatcatagaataagcacttaaaaatcagaaatcgtttttggagaaaagattttcagaaaccctagctaggagaagtgaaaagtcgttcgaaaattgttaagtttcttcataaaaacaagcaaaaacagttcgatcttcctcagatctatacagatctgaaaggtttaagaaacaacattaaggtttttgaggaaataacctagagatgaagatatcggcttagaaacccataggtttaggcaaacaatagaacgatcttactcaaatcgagccatggcggcctgagacaggtaagaacatgccaaaggtgcgactggactgaccctgatcccttgaggacctcaaagatagcaaaaacctggtgtaggagagccattagggcttgaggatgatgataatccaccatagtcgacggcatgagagtgacaacgagggggaaattagggttagggtctgagagagtttgagagagaagggggtgagtgaaggtggagtgtgagagagaagcgaggggtttggggggggggggggtcatttagattaattttggaaaggattaatctgggccattgatcaaaattgattgcggctaggatgtaacaagaattgggtcgggtttgggtaggatttgggccaaggttgtcttgggctggttttaaggtatttgggatgacttaattaggctgcaattgaaataaaataggctatttttttaatacccacaataaattaataaaaaataatttataaaataaatattagtcataaaattgaatttcatgcatagatatgtttttgaaaatgattatttagtatttaaaaataccaaaaggctaatttatggtaaaatgatacaaaaattatatacatgggctataattgtaaagttattgcaattatagccaaaaggtaccaaattggctatttgtgaaataatctggacttaataggaccataaataataaattaaatcaagaaatatttatgaaatcatttgtgatgcaattttgtaattatttactagaaataaaatactggacaaattaataaaaatgtgaaaaaattgtggaaaaataccagttgatgctaatgcatgattttgaaggtatatatgcaatttaaaattatttttaggaaaatttgggtatcaacatgaagtcctacataaagtcacatttttatatcataaaaagggcttacttgatgtccatgaagggtacaatagtcgtgctagatattgagttcaagttggtgccaagttgattgcgaatttccttcaagatttttaaggttctatccaagattgttttgggacttatttctatatattatgggattatatttatttatttcctagttagttaaggttatgttttccttttactaagattttttggaattacttttcaataatgacttggtttttgctttctagtattttccttttccttagctagttgaacttcttgtccaaagtagtttaggaatttatttccttgtttttaggtacaatttcatgaccccctatccacataaagaaaagaagggatagccttaacataccttttgtcatttacctaaccacacgatgtcgttcagcccatgatagcatcctagtaagatcaaatctattcaacgacaaggatgaagctttggaatctcaaagagggcttttaacaaggtctcaagctaaaaagttgtataacaaggtcattggacttcagaagcgaacaaagaagttgttagttgggaggaaaagctcaaggataaaggatatgagttatctaggtgttataattattttatgggccaaattcatgtccaagaagaggtggattagatcccaagaaacatcttgtgatgacccaatgggtcattttatgaatttagactccattctaggcttattagccttaaaaagactaatattaactacctcgatttgcatgtacagtccgggcgtgaaacaggaaagcttttatgtgaaaatatgagaaatagtaatttctagagttaaaatttggtattagttgactttggtcaacatttttagtaaatggacccgaatatgtgttctgacaatctcgagaggtccgcagtaaataacgggacttaggagtatgctcggaattgaattctgaggtccctagccttagaaaataatttttgaagaagattgttctacttgttaattcaagaaataaagaaatgaaataatatttcaaatcattggtatcgggcccgtattttggttctgaagcccggtacaagtgttttatgatatttaagtcttatttgtgaaatttgataagaatcagagttgatttgatgtgattcggacgtccgtttgaaaagttagaaaattatgagttttgaggttaaattcgtatttttttatgtttattttgatgatttgatcgcacgagcaagtctgtatgatgtttttagacttgcgtgattgtttggtttgaagccccgacggcttgggtgagtttcagataggtttaggctatgttgcgcttgtttttttgcttcatagtcgtttgttcaagcataaatgatactacaataagcaaatgcgatccaaattcagtttttattgaaccattagatccgcatcgtaattacgaatccataggaaaatgaatcatcaaatttggactcgtatgaggaagttattctcattttcgtgtcggaaaaaattgatggttctggtgtggtcgcaaatgcgaactttttgtaacgaccaggatggtcatcctatgagattagccccattttccgtgtttcagctttttcataagttatttaacctaattatgttattttgggtcggttggcttgggtttggagtggtcgtggtaagaaatgagacacttagtctggtggccttatggttagaaaagtcaactgggagatgactattatgtaaatgacttcaaaatgtggattttattgctcggatatcttatttagatcatttgggacttaggagtgtgttcggaatgtggttgtgaggtccgaagtagaattaggcttgaattggcgaaatcaagtttttggcaatttccgatcgacagtggaaaattagctatcaaggtcggaatgaaattccaatagttggaacaggttcgtagtgtcattttggatgtgtgtgcaaattgtttggtcattcggacgaggtttggttagtttcagcatcgttggtgatttttggaagtttgaaaatcttgaatcatgggttgatttggtgcttcaatgtttttttgggttccgagggttcgactaagtccgggtgattcaatgacttgttggtacttttggttgaggtcccggggccttgggatgattttggatggttatcgacatggtttttggcattttggaactgctggtgtgaagccttttggtttttccgcacatgcggataggggaccgctggtgcgagtccacaaaagcatacgagggatcgcaaaagcggaaacggattagggggaggaataccgcagatgcggaaggagggtcgcaaatgcggtttttggccttatgatgaaatctcgcaggtgcgcacctgggatcgcaggtgcgataaataggtcgcaggtgcggtcatcgctgggaagaacctataaatagaacccttagtgaattttggtcatttttccaccatttgcatacggatttgatgcttttgagagagttttgaagaaggaattcgagggaacttcgtggatattggagcaatcggaggcggagtctagaggcaaaggcattgtgtgctaggattttaaccttttttgaggtaagtaacatttccaaacttggttctgagggttcgaaaccccgaactatatgatatatgattatagttaaggtggcgcacatgccaagtaacgggcgtgcgtgcgtgcaccgagtgatttgtggcccggctcatcccatgacaccgtctagtagctattacggattgatatccgcatttccattgatgtggttaatgtgtacatgctagaaatcatgctaagttcattgctaaggcttcatgccaaaaatgctgagacccgagtggtcgtatgtggctatctctttatttgtttatttgttttcatatacttagtcctgtcatagcatatcatttcatgcctcagtcttggtaattgttaattttgtacatttatcattgtttcaggctagttcatgcatctgtgaacccatgtgagcgagactggagagtaatgactcaggaggccaagcacctgttattgagagacagttatgagatcggactgcacaccgcaacgatactccgattacgccttcgttggcttgttttagcgcttgggctaataggagcccctctagagtgtttacacccccagtgagcgcatttatattttagggatggatcttccctggacatggatcttgtccgaagttgatgatatgtgagggatggattgtcccctggaaatggatcttgtccgagtgttgtattccggagatggatcttcttcgaggggctggattggcctttttctcagtacttagtgactacggtcaccggtgtttatgcatatttctgggatggatttcctttgggcctgagagccatatacagtactgagtggacttttgtgtgagagttgtgagcactatgtgcatttccacactgttcatatataggtatgtagggtatattgagtttcttgggatactggacatatctggtatattctgttttcattatctgataaattgtaaacatgtctaatttctgtacactatcttatttaattgttgaggtttagtccgtcactacctctcaacccataatttgggttcgttacttactaagttggtgtactcagattaccacttgcacataggtgcatatccaggtacatcgagacccggtagtggttgttgagcggctgtcagagttcctttggaggcatcgaggtagcagctggcgatcgcagcctcaattgtctccttcttagctacttgtcatatttagttatttacgacaactttatgtcggcactgtattttgatattcgatgtagtagctcatgactcggtgacaccatatctgggttcgggttttctcttacttatgttttcaatgatgattaaattcttaaatgctttataaatatgagactcttgctgcaaatagagtggagttttctaaaaataactgttagcaaatgaaacgtgtggctttcctgattttatgataggcaccatcatgactgggtattttggggtcgtgacaagttagtatcagtgcactaggttaaataggtctcacaagtcatgagcaggtttagtagagtcttgcggatcggtacagagacgtccgtacttatcttcgagaggctacagaacccttaggaaagatctcacattcttgaattccgtcacgcgaatttgttaattcctggaactaaacttctgttgtcttcattctctcacagatggcgaagactcgcgctaccgatcagggtgacaagacaccaactaggctcgtgaggggccgaggccggggtcgaggccatggtaggggtaggggtgcagcccacgcagggccgggaaagtacctatggatcctcctattgttcaagatcaggtcctcgccacagatgtcccagtgggaccgatttaggcaccgatagtgcctattgtgattccgagtcttcaggagactctagctcagatcctgactgtgtgtaccagtcttccacaggcagtcgctatgtctactactaccgctacttctcaggccgggggaggcagtcagactccagctgcccagacacctgaacaggttactcaggggctccagacaccgggggcagctccatcccagccagtcgccccagcccaggattttgtggtcccaactatggcggacgatgatcagcgcaggttggagagatttagtagacttcaacctccgaattttagtggtactgagggtgaggatgcccagggcttcttagacaagtgtcagagaattcttctcaccgtagggataatggagaccagtggggtcccatttactacctttaagttctcaggagcttcactcacttggtgggaggcctatgaaagccgtagggcagttggtgcagcgccccttacccggcatcagttctccgtccttttcctggagaagtatgtaccgtagtcacgtagggaggagctacgcaggtagttcgagcagttgcgtcagggggacatgaccgtgatgcagtatgagatgaggttttccaagttgtcccgtcatgctatctagctagttcccacggataggaagaggatcaggaggttcgttgatggcctcacttatcaactttggatttttctgactagggagagggtatctggcacttttgttgaggaggtagttgacattgccagagagattgaatcagttcgtcgtcaggagcgagtcgagagggaggccaagaggcctcgaggatctggtagttttggtggtgttcatttaggaggtcagtctcagcacagcagaagctattcattttggcctcctcagccagtccgcccagcctatagtggcgcatcatcggggcatggtccacgcagctctcatttgggccattcctcattcaatgttcttccatcgtagagtttatctcggccaccatcagttcagggttcctcggcgcatggttcttctagtggttattctggttctaggggttcccttcagttcccaccgtcattgacttagaggggttattttgagtgtggcgatccaggtcatatcaagagattttgtccccgtctctcgggtggttcattccagcagaggagccggccttcagcttcagcaccagttacttcaccacccgcccaggcagctagaggtgggggccagacagctagaggccgccctagagggggaggtcaatcaggtggaggtcaggctcgattttatgcacttccaactagaccagatgttatggcctcagatggagtgattacaggcagtgtctcagtctgtcaccgagattctttggtcctatttgatcctggttccacgtattcttatatttcatcatactttactcattttctagatgtgcctcgtgagtccttagttacatctatcgaccttggtggacaatactattgatgtggaccgggtgtagcggtcatgtgtgatatctattaggggtctggagacccgagaggatctgttattgcttagcatggttgactttgatgtcatattgggcatggattggctatctccgtgccatgctgttctagattgtcacactaagaccatgaccttagcgataccagggtttccgagggttgaatggagaggctctattcagtatgtgtccagggtgatttcttacctgaaggcccagcgtatagagaaagggtgtttttcctatttggcttttgtgagggatgtagtgttgagactcccactattgattctgttcttgtggtccgttattttccggacgagttccctgctgatctgccaggcatgccacctgacatggatattgattttggtattgattttatgccaggcactctgcctatttctatcccaccgtatcgtatgtcaccagtggagttgaaggaattgaaagagcaattgcaggaactcctagataaggggttcattcggcctaatgtgtcgccttggggtgcgccagtgttgtttgtggaaaagaaggatggttccatgaggatgtgtattgactataggtagttgaacaaggttacagtcaagaataagtatcctttgtctcgcatcgatgatttgtttgaccagctccaaggagccagagtgttctcgaagattgatttgagatccgagtatcatcagctgaagattcgggattctgatattcccaagacaactttcaggactcgttatggccattatgagtttatggtgatgtcttttgggctgaccaatgccccaacaacgtttatgcatttgatgaacaacgcatttcagccgtacttggattattttgttattgtgttcattgatgacatcctggtatattctcatagtcatgaggagcatgctcagcatttgagagttgttttacagagattgacggaggagaaactttatgcaaagttcttcaagtgtgagttttggctaggctcagtagctttcttaggacacgtggtgtccagtgagggtattcaggttgatccgaagaagatagaggtggtgcagagttggccaagaccgtcctcagctacggagattaagagcttccttggtttggcgggatattaccatcgctttgtggagggattttcttctattgcttcacccttgaccaaattgacccaaaagggtacttgtaatgacccggtcagtcgttttaagagttagcgccccgattccctgataacagcgtctcccatgcctatttatgcttttgggacttgccagaatgtttagttgtgaatttcggagagattttggacacatagtccttaagtgtgaatttaagctttagaaatcgggctgtagttggaactgtttgaagacggatccggaatgggattccgtcaactccgttagcttcgtcgggtgatttcggggttaggcacatgttcggaatgtgttttggaagtctgtagtagatttaggcttgaattggcgaaagttggaattttggcgatttcggccgataggtgaaattttgatatcgggatcggaatggaattctgatagtggctgtaggttcgcagtatcatttttaacatgtgcgtaaaatttgaggtcattcggactagttttgacgtatttcggcatcagttgtggaatttggaaatttcataagttcttaggcttgaatccatgcataattggtgattttgatgttatgagatgtgttttgaaggctcgactaagttttaaggaagcattaggtctggttggtaagtttggttgaggtcccgggggcctcggggatgtttcggatgctcaacgggtgattttggaatttggaacacagctgaaccaatgctggttctggtgtttcacacctgcggacagggaaccgtaggtgcgcacacacaagtgcggacacgcatgtgcgaaggttgggttcgcagatgcgaaatttggtcaggggttgccagtggtctcaggtgttgtctgggttctgcaggtgcggccccagacttgttaagtgagttttcgcacctgcgatggattttccgcaggtgcggtccaagagtcgcatgtgcggaatccctggactttttatacaaaaatctgagggtttgaaattcatatttcctaaaacgatttatagctcgggctttggcgattttcagtgggtttcgaagggaagcttcctaggtaacgatttctaaccttaattcactcgtatatcattaatctctagcaatttcctcaatctaatcaatgaatttggatgaagaatcatgaatatgggatgaaagttccccaagtggaaatcgtaggatttagggagattttgacgtcgaatttaaatgattcttgttcgagtgagttcgtgagtgaatgggtgttcagaatttgtaatttttatttgtttccgagacgtgggccctgtcacacctccttttttacccgtatgggtaataagggagtttttccaattaaagtgacattattcgattttttgggatttattttattcagagtcgccacccgaattttttacggtgttccgggacaccatttatttattaaaatcccaaaaccaaggaattttgactccgttaaattgtctgcgaaccaaaaatccgggtaaggaattctgttaacccgggagaaggtgttaggcattcccgagttccgtggttctagcacggtcgcttaatgattaaacttggcctaaattgtttaattactgcttttatacatatgtgcattttttatattctttaccgctttaattattcttttgtattcaaagagctcttttgatacgggtcacgtatgggtaaacccgttgagattgaaatatgtcaaaatcatgtcacgcggacgtgtacataattatcgacactgaattcaattaaagaagtaactaaagttgcgcaagcgcgtatttttgttttgttgtaaaaaaaaaagaaaccgaaatcacgtcacgcggacgtgtacgtaattccgtaattttttagaaattcgttcctaaaagtgtctctacaagtgttcattttaacatttatttgtgtcacgcaaatatgtacacaatttttaaggaaaaatattcattattataaatgtttgtttttttttattcaaagttacacgaacgtatgctttgattgttaaaattctaagtgtagtaccttagatttatttgaaaatctgcgcttaaattatgtcacgcgtacgtgtacacaagtggtcacgcttaattatttaagaaaaactccaaagccgcgtgaacgcgtaccttgattttattttaaaaatcataattatgtcacgcgaacgtatacacaatcacaatgacaatctaaagtgcgcctaaagaaatatacaattgttcaagttattcatattacgaaattgtacaagaaattttataccaaagttcttaacaagattccaaggggactcgtgaagggaaaaaaaaaagattttttagtcaattgctctatgctgactaggcttattaatggctatatatgaggggtgactattatggaaattactatatactggaggcttattgctggtcaaattactagtactcatattaaatgcacctctttctgaagattagccttatttttacatcaaacaattaacacaatgccccgaattattaatatttctagtctatcttaccattgcaaatcaaacaaatctacttttgcaatttaaactgtttgccaacattaactatgaaataactatgaaaagcatgtagttgttcaacaatcagaaaatcaaagataaaatattctatatgagttaaacaaggagataaaaaatcaaaagcaacaaaaatgggccaaccgatatagtattattatcaaaacactagaaaaaacaagaacttaccttaaacggaaattaaatgaacttcctcacttcttttgccttctgtattttcgtccttttcctcttttttttttgtttcagacttctccttttcgtcagtccctttcctcccttttgtttcacttttctttgttttcttttgctctcaattttttttttcgttctttttgctttctgtttcttttttttttctcttttgtcgttctttttttttttttttgatagcagtccctttcttcttttttacagatgtaagtcctccattatatatagatgtgtatgtgcttgtaacttatgtgaagaaagtgggaagttgggagaagaatgtgagtgtggtgtgagagtggggataagacatgagtgtagtggggagttaaaatagaaaagtggggaagtgggcaagttgggtgttattattattattattttagtatatatataaacttacttttagatttaaagaaaactatataaataagaaaacccaatatttacactatagtttaaattatactaaaaaaaatattattataaattagaagaaaccaagtttatatatataaaatttcttctatttaaatattggaataaatcttatattctaagattgtaaatattttttgtagttcttttatataaataaaacctattaagagtaagataaaaaatttaaagtattaagattagacctaaaagaaatatttacaccaaaataatatagaatttgggtgtggtcgaaaattagttgttcacagcatgcccctctttgcttggaaacataaaaagttttcaggcaaagaaaacgaacaaggtgactgattttttaaggaaaagaagataaaagaaaaagatgtgatcgagccttggttttaggcagcttacatatcccgggttataagggaatcaggtctcgtgtagttcaagtggaagaagagtgagggagtactcttagagggagagccgactgaagttccgctgaggttccgatccgcagttcctactattacatcaaaatgaagagaaaattacatactcttgaaatctaagagttacaaaattcctatctatatgtcatctgaagtcttgtcttgattcttgacttgcttcctttattgactttagactgaaaatgatgctctctgatataaaagactatgaaatattctcacaggcttgcttcttgatccggtgataagaagatggatcttgaaatcctctgcatgcatcttgtcaaagctgcttgcggctggtgttgagatcaaacgttccactttctctggcgagagtcggaatcttatttttacccatccaatccgtgccaacgttaacaagaatacaagaaaccaggggatgtagtaccctgtgttgaagataagatgaggtacgtgccactttgagatgctactagggaatgtcgtaccctatgttagcaataaaaaaaaatacaaccagggaatgtagtaccctatgttggaaataagatgaggttattggctctttaagattccactagggaatgtcgtaccctatgtaggcagaaaaatgcaaccaggggatgtagtaccctgtattggcaatgagatgaggcccgtggctctctgagatgctactagggaatgtcgtaccctatgttgacagaaagtcatgcaaccaggggatgtagtaccttgtgttggaaaataggatgaggctcatggcccactgagattctactagggaatgtcgtaccctatgtaggcaaaacaaatgcaactaggggctgtagtaccctatgttagcaataaaatatgcaatcaggggatgtagtaccctgtgttggtgataagataccgctcgtggcgctctgagatgctactagggaatgtcgtaccctatgttggcaataagaaatgcaaccaggggatgtagtaccccgtgtttacgataaggtgaggctcatggctcactgagattctactagggaatgtcgtgccctatgtaggcaaaacgtaatgtgactaggggctgtggtaccctgtgttgaagatagggtattgattccctataataaaactaagaataacatgattacttgtatatcagaagaaaactaaggatttgagaacttcacttggtggtgttcgtcttttcacgaactgtttcctaaaattgttctgttcctgttctgaacaaagaaaaatttgttagttttaaaaatggtggtcagtttgtggccttgatttcttgagcgacttgaccttgcgtccattacaattattagaaacactgactccatcgatggtcgtataaattgccaggagattctgtcattacttcccggagatcttctttctcaacatcaaaacctgactattttgagcctatcaccatttttgtttatggtgcaaacaaccttgctcccaaaataacttttaactgagtaacttttgttgacccttgacacattgttcagtccttcaagcattttcctcatcaaggaaatcagagatggctttacgcctttgcccatgcatgttcatgcccaaaatgttttttctttatataacatggaaactgtaaccaattttgtggccttttctttgctttgctttgacaaaattagactcaagaggactcaaaaagaatagtacgaaagtgaactaataggtattataacttaatcaagaattgtacctttcaaagaataaaaatagaaacgacttatctggaggaatatgctgacttcaatgaacatgacatgcactttggactggatgcccgatccgtccgaaccgtctaattttcaaaatctgttgtaaactccactttgaaaatgagttctttgtcttaaccatgcttgtgccgggatatatgaaggcctaaatcgatcaacgatgccctttgtgggttttcaccaattgacctctctcatttttctttctctcaactcactatcgccttatagtgcccgtgaaggttttcaccgataagactctctcattttatttttctctctttacaatggctgagtcatcaccgtgatataccaacttagcatcctcgaaagctgatcagaaggtcttaaaagggaaaggtaaaaagaactattcaactgaattacaacttttggaaccattttgacgaaagattcgtcgacaattaaaataaaaccatgccccagtttctttgaatactgggaaatgtgtatttttgttttagtgtgaccgaacccagagtgaggctgcctacgtatcctttcggaatcaggtcagacgtagttcaattaacatgaacttgttttgattttttttttttttacattgattccataagaggggaaaacaaagaaataatataaacaagttttcaaagggctaactagggttgaccagtgtttggatagcgagaatgatagcctttcgtcatcccaacctgagaatgctaagtataaaatgccccaacaaagtcatgtcagacataatatctcttgaccgcatccgcgttgacggatatatcagtcacctttccttctatatctgccaagtgtagagctccttttgacaatactttcttgacgaggtaaggaccttgccaattcggggcgaactttccttttgcttcttcttgatgcggaaagatacgtttcaaaacaagttgtcctacctcaaactgtcttgggcgcactttcttattataagcgcgtgccattctttgttggtataactgaccaaaacaaactgctgccaaacgcttttcatcaattaaactcaattgttccaatcgggacttgacccattcagtgtcctcaattcctgcttcaacaatgattcggagagagggaatctcaacttccgcaggtatgactgcttcagttccgtaaaccaacaagtagggcgttgcgccaactgatgtacggacagttgtccggtatcccaaaagagcaaaaggcaatttctcgtgccattgcctagacccttggaccatcttcctaagaatcttcttgatgttcttgttcgcagcttcaacaactccatttgctttgggccggtaaggagtagaattgcgatgctcaattttaaattgttcgcatacctccttcatcagatgactattcaagttagcagcattatctgtaattatggtttttggaataccgaaacgacagatgatgttggagtgaacaaagtttactactgctttcttggcgactgccttcaatgtaatagcttccacccatttggtgaagtaatcaattgcaaccaaaatgaatctatgcccatttgaagcttttggctcaattgggccaataacgtccattccccaagaaacaaaaggccaaggagccgacataggatataactctgaaggaggcgagtgaatcaaatcactgtgaatctgacactggtggcacttgcgaacaaaacgaaagcaatcgcgttccatagtaagccaataatatcctgcccgaaaaattttctttgctagaacatatccattcatgtgcggaccacaaactcccgaatgcacctcattcataatcatttcagcttctttggcatccacacatctcaacaaattcaaatccggagttcttttgtataggatttccccactcaaaaagaaaccattagagagtcgcctaatagttcttttttgatccctattagcatgttccggatattctcttgttttcagatactgcttgatatcacggtaccatggctcaccatctagttctgcttcaattgtattgcaataaccatgtcgatcccgaatttgaatttctaatgggtcgatgcgggtattgcccgggtatggaagcattgaggccagggtggctagggcatcagccaattcattatgaaacctgggaatgtacctaaactcgatggacttgaaccttttgctaagattttccacacattgtctatatggaatgagcttgatatctggagtctcccattcaccttgagcctgccgaataagcaaatctgaatctcccatcaccaacagttcgtgcacatttagatttattgccatgttcagacccatgatgcaagcttcatattccgccgtgttgtttgtacagaagaaacgaagtcgcgctgtggcagggtaatgctgcccaggaggtgatacaagaattgccccaatccctacacctttgatgtttaccgccccatcaaagtatagtttccaaacttgactgtcatcttggactgcttcttcaactaaattaacctcttcatctgggaagtatgtgttcaaagattcatactcatcatcaaccgggttttctgccaaatgatcagccaaagcttgtgctttcatggtcgtacgagtgacataaacaatatcaaactctgtgagcaagatttgccactttgccaatctacctgttggcatcggcttctgaaagatgtacttcaggggatccattcgggatatgaggtaagttgtataggccaagagataatgcctaagcttctgggcgatccaagttaaggcacaacatgtcctttccaaaagagtatattttgcctcataagtggtgaactttttgctcaaataatagattgcttgttcctttttgcctgtggcatcatgttgacccagaacacaaccaaacgaactatccgttactgacagatataagaacagaggcctaccaggttccggtggtaccaaaacagggggatttgacaaatattccttaatcttatcaaaagcttcttggcactcatctgtccacttgatagcagcattctttttcaacaatttaaaaataggctcacatgtggttgtaagctgcgcgatgaacctactgatgtagttcaacctcccgagtaaactcatgacttcttttttattctttggggcaggaagctctcgaatggactttatctttgatggatctaactcaatgcctcttcgactaactataaaacccaaaagcttcccagaaggaactccaaatgcacatttggctggattgagttttaaattgtaccttcgtagcctttcaaagaactttttcaagtcttgcacgtggtcatcttgtgttctggacttaatgatcacgtcatcaacgtacacttcaatctcgttgtgcatcatgtcatggaatatggtagtcatggccctcatgtaagttgcccctgcattcttcaaaccaaatggcatgactctataacaataagttccccatggagtggtgaaggcggtcttttctgcatcttcttcatccatcagaatttggtgatacccggcataacaatccacaaaagattggatctcatgtttagcacaattgtcaacaaggatatgaatgttgggtagaggaaagttgtcttttggactcgccttgtttaaatccctatagtcaacacaaactctgattttcccatccttctttggaaccggcacaacatttgctaaccatgtagtgtatcggacaaccctgatcacatttgcacttagttgctttgtgatttcttctttgatcttatcactcatgtctgtcttaaacttcctttgtttttgttggattggtggaaaattaggatgtgtgggaagtttatgaaccactaaataggcactcaaacccggcatgtcatcatacgaccaagcaaatacatctctatactcgaacaaaacttgaattatggcatctctcgtcttttgttcagtatgaatgcttatttttgtttctcttgtttgttcaggacttcccaggttaattgcctcagtttcatttaaattaggcttaggcttattctcaaattgatccaattccctttttatttccttcaaagcctcatcttcatcatactcaacttcttgattcattatttcgagattagacagctttttaagacatgggcatgaattccgcgtgtatgtcatgtttttaaagccagcattaacaaaactgaaaatgataagaaataaacaaaaattaggggaaggaaaagacagaattttactatgaaactggaacttcatttcattgaatttgaaaggatagaaggattaacatcaaagcaaagcatttgaactaaaatatctggattataacccttaaaataatccaaatacagaaaaagcaacaaaacagactaccaagactccttcctgatgggaataggagttgcttcccagttgttgagagaagtatctggaccaatcagttgaacacttgcacggctagggccctcgctaacttgaaccatattgatctcatagaacatctccttgagaccttggcagacttcatcaatgtcatcctgagtagaaagattttggacttcttcaaaatgtggcttgacaaaagagtaagcgatgtgagggattggtttggacaaattcgaaccattctttttgcgggccttggctctatttttgtcagctgatgtttgtttaaaacccaagccaaaggtatctttcttcaaaaaggtagcaatggggttcacaattccctgcagagaggatcctaatccttttccttgttcgtagccgttcctcaacattagtgaagctaccatcatagatgtgtctgaaagacggggatgcataattggttttccttcttccactcggtccatctcaatcacctcaaatgtttgatatatgagggattcacatccttccttggcctcgatacatggaatggatgggtcattatagacggatgagtcgtcctccccatgaataacaatttcttgcctgtcatactcaaatttgaccatttgatgtagggtggatggtacagctctagccatatggatccacggccttcccagaagaaaattataggaagttttcatatccaacacttgaaatacaatgttaaaatcaactgggccaattgtcatggtgagttcgatttccccaatagtgtctcttctagaaccatcaaaagccctgatgctgacactactagttcgaattctgttagtgtcaatgttcagttgttgtagagtagaaagagggcatacatctacacttgagcctccgtcaatcatgactccttttacgtaatgcccttcacatttgaccataagatgcaaagctttattgtgctcagccccttcctcaggcaaatcatcatcgctaaaagaaatcttattcacttcaaagaatctttcagccattttttctagttgattcaccgttgtcttttctgagacatatgcttcgttcaaagttttgatcaacacacggcgatgttcttctgagtgcaaaagcagagataacaaagatatctgagcaggggttttccttagttggtcaatgattgagtagtcttgcattttcatcttcttaaggaattcctccgcttctttttctgcaacgggttctttcactggcatgtgactgtccctggcttgcttagcttttctcaattcctctggcgagtagcatcttccagagcgggtcaagccccccatttcatctatttcttcaactatctcttttcctttgtatgtcataacagtcttgttataattccagggaatagcttttgtgtttgtcattaggatctgtgcagcaggttggatcacaactggctctgttatatttctcaacccattatttggaacaatcttttgaatccccccggggatgtaaagttttggaccacccaattgaacctcaaccttttttgtgcttccagggacatagagaatcgtttttccagaacctatcaagttcaaacttgaactcgcacctttcacaatcaacggtgccaaacgcggtgggcttactatcacttttggttcttgacctatggttccaacaaccatctttgtcttgccagactgtttataatctcgatcatcacaaatcatcccaataaaatgtgtattatcatgagttgggagtggattgtttgtgatattaggagtatcctcattatttgtcacgacaattgcctttgcttcgatcaaattttcaatggctttctttaatgtccaacaattttcggtactatgaccttgggtgtttgagtgatactcacatcttgcatttgagtcaaaaccttttgaatttggattcacataacgtggcatgacaggttcaatcaacttcaattgcatcaattttcgaaataggcttgtataagattctccaattggggtgaactctttctttggctcctcctctctcacatatccttgtcggggatgaggattatatgatgcctgaaaattcgggcgcagttgacgggagccttgtggaatcggtgcccgccattgctggtgattgggaggcctagcataagcctgagcattaaacactgtgtattgttgtgggggaactgagtatcggggcccctgaggtggatagtaatgttgaggagaattggattgtccttgttggaactgcacataagaaggaactacctctctttgaattcctctgaacccagatgccatcatagatccttcctctttctttttccggtttccgaaactgcctgacccgctttgaattgcttgtgtggtagccttaagggctgcctgactcacaattttgcccgatttcatgccgttctcaactatttccccgatcttaatcgcctcagcaaaaggtttaccaatggcggctaacatataatggaggtaatcagtatcctgagcttggagaaaataatcaatcatttctgcctctttcattggtggtttgaccctagcagcctgctctctccacttgattgcatattctctgaagctttctgttggtttcttctttatgttgacgagggaggaacggtctggcactatatcaatattgtactgaaactgttggacaaaatcttgagccatgtcgttccacacatgccagtgagagatgtcttgatctatgaaccattctgaagcaattccagtcaaactttccccaaaataagccatgagtaattcttctttgcctcctgctccccttaattggttacaatacctcttcaaatgggcgatgggatcaccatgcccgtcatacttgtcaaacttgggggtcttgaaaccgggtggcaaatggacatggggaaacatgcatagatcgttaaatgacacactcttgtggcctcccaaaccctgtatgtttctcatagtttgttccaagctcttcatttttctagtcatttcctcttgttccgtattcttgtcaggcttttcgacctcaactgggaacatgttctgaggagtatgcttgtatgaatccggaaccttgaaagtcagttctgtagagtaatgttgagcatcatgagcattcggttgcagatcattgttggacttttgagcaagagctggttgaggaactgtgaaagtagggacgatgggtacagtatgtgggtcatttctgaggggtgcaattggagaacgtggaatggaagtactggggatagtgggaaggttaatgcttggactgaatccagattggtacaacgggttacttgttaaggatatgggcacttgatttgcaattgatacattatgaagattatctgaagaccctttgggtggtggaggcggtgcctgtccattcgcccaagcttggtacatttctgccaattgttgcttcaacattcttacttcttcaaccagtcccgaactttgttcgaccaattgtccatggatatcatcattatctgactcattctcactgttgtttgccatgctactttttccttttgatcttgtgttgtatgggtgagttgccagtttaaaccacaaaccaaccacctctgtttaactttatctcaaaagatgataaacaacaaacgtgttagagttaggcattttgcagatattaatcacacattatatgtcatgcacctaatgccattttcatttctagaatgagtttgacaggcttcatgcttcatcccggcttattggtttattggtttattttcatcttgaatttagcgttctctttcttttatttattcctaaaatccttttttttattattattattattatttattttttaagattaattatggttatgatcgcatccgatggggattgcatacgtatcatgacgccgcatgaatcagaccattacgtagttcatgaagaggggaaaaaaaagaaaaaaaattaaataaaataatggtctttttttttttttaaaacaaaacgaaatagatcaaaatataatgacagaaagaacattacatcaaaacgacttaacagactttgacaaacttaaaagacaggaatttaaaagactaaacaatgactcaaaataaaatgactgcgacatgaaaagttccaacaactagactaaatttcaactctagaatcatttgttttcaaccactggtacatctgctcatggtggggcttgtcccggctgaccccccaatgtacgatacatcctttccaactctgctgcaagatgacgagcaaaagtaggtgcatgctccaaaaacttctcataatccatcccttggcagttcacatagctttgagcagtataaacagccaaatcatggacttgctctctgaaatactgaaaattctggtctcgatcttgtaactgctgctgacgagtggtggctatctcccttatgtggccctcgcgatctaaagctgactccaattgagcccgaagtctagcctgctcgagtctctcctgatccctctccctgtcaaaatctgcatgctggtattctctattgtaccttctcatttcttctaactgtgcatggagctgagcttttgaacgtacccaatgggccttctctctctcgaattgagccctctcttcttcaaattttgttgcttggcgctccttacttgattcggccttctcacttaactgtacgattgtttccttggctttgtccaactcctcttcagtctttgccaaaatggaatcataatcttgcactttttccatcagattggctatagttctctggtctttccaacttctcactggcacttcggaggctttcttcatctgctgaagccgaacacggagagcttcattctgacggatcaaactcttcttttcaccttccacttcttgtactagtatgtttttctcaaaattgaggtttctcaggctttcttctagggcatgaatagttgctttgtatcccttttctttttcaccccaagccaaccgttcttggattttatcatcaaaggcttgaacatgtggcctttttacgggccttttgggctcgggttctcgctcatcatccacgcgagatctcttctcgaaccacttagcataacccggatctatctcacccttcgcaggatctggcacttgggtatcatctttcaagtagcgacaaccattccaaatttgttggattaaagcctcagggagtggggcttcagggtgtagctcaatcacttgtgcactcaaatcttcatcatcaggaaccacttgataccttcctagctgccttaggactctctgtggcgcatatggctggacacttctcaaacccaataacaacaaataactctttagggacgacatgtgtatcacctctcttaccgggagccaccccaaagtccactcaatttgacttgcatttaaggatcttaggtgggatatccaagcttccactccttctggagagttataatcttttattctttcttcgtaactcttaatgaaattatccttgctcggaccatactgcatgaacttgggatgatgtcggagatgttcaatcaaccacatttgcaacaaaatattgcacccttcgaagaattttgccccggacttacacaaagtcaatgcccgataaatgtctgacagaatgatcggggcaagagtgtgatgttctttggtagtaaggacatgtacgaccctggctatgcggatatcaattgttcgctctttgtttgggaagaccatgactcctagaaaagccacgatgaaggcaaaacgacggtgaatctgccacgtgtccttgtcctgcttgttggttaggcctttttcatgaatttcaaacccatttggctgcccgaacctagaatacaagaaatagaaagaacaacaccctttgactatgttggtctttctgatttgattactgatgttcagaagaacgtagaatcagtgtatagaggagccttcggaaatatgagcttctggtttctcaaatccttgccaaaatcggaatatccagctatttcttctaaagtaggagtaagctcaaaatcggagaagcggaagacattgtgaacagggtcccaaaaagtcactagtgccttaatcaaatcatcgcgtggtttaattttcataatatctgtgagggcccccagatacttagtgacccatttctgaccatcttctcctaagtcataccaccacatctgaagctgaagtggagcctcatctacaactgtcaacggtgtgttctggatagtgctcattatatacctgtgggtggttaaaattagggttgacactagtctcaaaagacagaaccaatgcactcattttgtaaaacaatccctttttttttataactcaaaaaaaaaaattaataataataataataaataaataaaatcaaatcaaagtgagggtggttatttttgcaattatggtcccttcgtacttcccaagatagctttagggtcgggatgggcatgatggtaaaagtgatgcccaattgacagacatgtccattcttgtgaaaacaaccctttcgacaattatgaagatgttctaaagttattccgacaaaaacggttggggattaaccaaagttgggacttcttaaaaaaaaaaacattagacacatttcccctttttttttctttttttttctttttttttgttgaaaatggggccggaccctatggaggttgcttacgcatctcacatccggtgagaatcagacctgcatagtgcggtgaatgtttcaggaatagggtgacattttttgaaaatccatgcttattttgtaataatctttttggggtagataccgagatttttcaaaaaccgggtaaattttcttgctcttgttttcccccttctagttttctttcaattttatacttttatttttgtttttgtatatatatatatatatatatatatatatatatatatatatatatatatatatatatatatatatatatatatatatatatatatatatatatatatatatatatatatatatatatatatatatatatatatatatatatatatatatatatatatatatatatatatatatatatatatatatatatatatatatatatatatatttttttttttttttttagaaaccggtcaacatgcacaaactgaatcaaacataatgcacaagtagcacataagatgcatcaggatagtcttgtaattctcgggtacacctgtcctagacggacccaacccctgtgttgagtccccaaagtcaaatgcacatgatgcaaacagacgttcctactagggatccggcatgaggctatgttattctaggtttaaatcctaggggagtgttttagacctggcttacccaagcggacagctcgagccgaggtgggggcaacgtaccgggagcacgaaagtctacccggcctagttactgaaccacaacctcgttctaattggtatgacttctaacagaaaagtgggccacgcgcacgtgtgcaccataaattcagaagactcagaagggaggcgtaagaagacagtttaatacagttcaaataatatcaaagcgataaataagcggcaattagcacataaggtacccaaaaaaaaatataataacatcaaattaataaagccaagtataaatcacattacaagctcgaattctgaaccctgaacagaagttttgggttcattttccccagcagagtcgccagagctgtcacacctccttttttacccgtatgggtaataagggagtttttccaattaaagtgacattattcgattttttgggatttattttattcagagtcgccacccgaattttttacggtgttccgggacaccatttatttattaaaatcccaaaaccgaggaattttgactccgttaaattgtctgcgaaccaaaaatccgggtaaggaattctgttaacccgggagaaggtgttaggcattcccgagttccgtggttctagcacggtcgcttaatgattaaacttggcctaaattgtttaattactgcttttatacatatgtgcattttttatattctttaccgcttttattattcttttgtattcaaagagctcttttgatacgggtcacgtatgggtaaacccgttgagattgaaatatgtcaaaatcatgtcacgcggacgtgtacataattatcgacactgaattcaattaaagaagtaactaaagttgcgcaagcgcgtatttttgttttgttgtaaaaaaaaaaaagaaaccgaaatcacgtcacgcggacgtgtacgtaattccgtaattttttagaaattcgttcctaaaagtgtctctacaagtgttcattttaacatttatttgtgtcacgcaaatatgtacacaatttttaaggaaaaatattcattattataaatgtttgttttttttattcaaagttacacgaacgtatgctttgattgttaaaattctaagtgtagtaccttagatttatttgaaaatctgcgcttaaattatgtcacgcgtacgtgtacacaagtggtcacgcttaattatttaagaaaaactccaaagccgcgtgaacgcgtaccttgattttattttaaaaatcataattatgtcacgcgaacgtatacacaatcacaatgacaatctaaagtgcgcctaaagaaatatacaattgttcaagttattcatattacgaaattgtacaagaaattttataccaaagttcttaacaagattccaaggggactcgtgaagggaaaaaaaaagattttttagtcaattgctctatgctgactaggcttattaatggctatatatgaggggtgactattatggaaattactatatactggaggcttattgctggtcaaattactagtactcatattaaatgcacctctttctgaagattagccttatttttacatcaaacaattaacacaatgccccgaattattaatatttctagtctatcttaccattgcaaatcaaacaaatctacttttgcaatttaaactgtttgccaacattaattatgaaataactatgaaaagcatgtagttgttcaacaatcagaaaatcaaagataaaatattctatatgagttaaacaaggagataaaaaatcaaaagcaacaaaaatgggccaaccgatatgtattattatcaaaacactagaaaaaacaagaacttaccttaaacggaaattaaatgaacttcctcacttcttttgccttctgtattttcgtccttttcctcttttttttttttgtttcagacttctccttttcgtcagtccctttcctcccttttgtttcacttttctttgttttcttttgctctcaatttttttttcgttctttttgctttctgtttcttttttttttctcttttgtcgttcttttttttttttttttgatagcagtccctttcttctttttttacagatgtaagtcctccattatatatagatgtgtatgtgcttgtaacttatgtgaagaaagtgggaagtggggagaagaatgtgagtgtggtgtgagagtggggataagacatgagtgtagtggggagttaaaatagaaaagtggggaagtgggcaagttgggtgttattattattattattttagtatatatataaacttacttttagatttaaagaaaactatataaataagaaaacccaatatttacactatagtttaaattatactaaaaaaaatattattataaattagaagaaaccaagtttatatatataaaatttcttctatttaaatattggaataaatcttatattctaagattgtaaatattttttgtagttcttttttataaataaaacctattaagagtaagataaaaaatttaaagtattaagattagacctaaaagaaatatttacaccaaaataatatagaatttgggtgtggtcgaaaattagttgttcacaggcccgggggaccttttagacaattttccttatttcgcgtattagcttcgaacttattagttattttgattccttaaagtgatatttagattatgcaatcgaattgaatagatttgggccacccgaagtcagatacccgtcgcaagagtgtggttttgagttgagtagcgcagtcgaggtaagtggcttgcctaaatctgtgttggggacttcctgttaggttgttttgatactgttttgttatatgggcgccgtttacgtgaggtcacgagtgcgtacacgggccattgttgctaaaactccatttctcctttcatgacttaaatcattttatccctatttcactgtttcatgtactgactgtgtagtttagcttaggaaggagcatgtctacttgtcttacttgagtttcccctatttgtttctacagacgagatttccccctgtactgcattgcatatttaaattggaactacagatgagattctgggagctttccccctgtactgcattgcatatttaaattgggactacggatgagattccaggagctttccccctgtactgcatggcatatttattactgtgagatacgatgtgctaagccgagggctccctattgatattttctttaagttcattgtttttactgttttgccttagcttattatgtctctttgttcaattttaaactgtttttactataaacatccagtagagccttaacctgacctcgtcactacttgactggggttaggcttggcacttactggataccaattgtggagtactcacgcgctttcctgcacatgttttgcgtgtgcagatccaggtaccaacacccagtttcgtggctaggagtcacttagcggctttgaggagaccgcgatgtaattctgccgcgtctgcagaatcccatgagtccccttatactctagtataggcctagatgacttatgtatttctgctacttctttgtatagagccacatttagtacaaagcttgtgactgttgtaacattccgaattttgggaagtgaaattgtacatgccaagcggccgtgttatgtgtcttcttcttcttttctttttcaattattatattgtttttatttctctacaaggtttaggcttacctagtcgtaaagaatagatgccatcatgagaccgttcagagggtaattcgggtcgtaacagttctccgttcaggtgggcagacgagtgtgaggagagctttcagaagctcaagactgcattaacctcaactctagtgttagtactgccatcaacgtcaggttcttataccgtgtattatgatgcctcgagggcattgttgtgttttgatgcaggagggtagggtgattgcctacgcctcgcgccaactgaagactcatgaggagaattatctcttacatgatctcgagctagcagccattgttcacgccttcaagatttggcgtcaatatttgtgtggggttcattgtgaggttttcactgatcatcatagtctgcagcagctgtttaagcagaaggatttgaatttgcgtcagaggagatggttggagcttctcaaggactatgatatcaccattctatacaatccggggaaggccaatgtagtggccgatgccttgagtcgcacaacatagattttggggagtctagcatatctccttgtagtagagcggcctttagcacttaatgttcaggccttagaaggtcagtttgtgagattggacttatcagagactgaccaggtattggcttgtgtagcctccaggtcttctctttatgaccagattagggagcgccagtatgatgacccacacttgctcgttcttcaggataaggtcaacgacgaggtgatgccagagatgtggttatcggtgatgatgggattatgaggatgcaggggcggatttgtgtgcctaatgtggatgggcttcgagagttgattctagcagaggcccacaactcacggtattccatccatccaggtgccgcgaagatgtattaggatctgagacaacattattggtggaggcaaatgaagaaggatatcgttggatttgtagctcagtgtctcaactgacaacaggtcaagtataagcaccatagaccaggtggattgcaccagagattagctattccagagaggaagtgggagcagatcaccatggactttgtagttgggctcccactgacttcgaggaagttcgatgctatatgggttattgtggattggctgaccaagtccacgcactttattcccgttggtactacttattctttggattggttagctgagatctatatcagcgagattgtccggttgcatggtgttccagtttctatcatttctgacagaggtactcatttcacatctcagttttggagggccgtgcagagagagttgggtactcaggtcgagttgagcacattatttcatcctcagacggatgagcagtcagagcgcactattcagactttggaagacatgttacgtgcttgtgtcattgattttgggggttcatgggaccaatttctgccacttgcggagtttgcatataataatagttatcagtcgagtatctagatggctccgtatgaggctttatatgggaggaggtgtagatctccggttggctagtttgagcagggtgaatccaggctattaggcacggattttgtacaggatgcgttggataaggtgaagttgattcaggagcggcttcgcacggcgcagtctaggtagaagagttatgcgaaccagaaggtccgggatgtgcctttcatggttggggagaaggtgctgctgaaggtttcacccatgaagtgtgttatgcggttcgggaagaggggcaagttgagtccccgattcattgggccttttgaggtgctccagagggttgaagaggtggcttatagacttgcttttccacccaggtaagcgagtgttcatctggtgttccatgtttccatgctctgagcaagtctataatatttgaaaccctatcgaatttggcaagtaaatttccagaaaaagccttaaatacaaatttcatgttaaatttaaagagaattctatcactttcttgaatagctaattttcctgataaaatgttgtttatttatgtgaatattgtatctatgggtgcctgagtcgcatgtatgattcccgagcaggataaccttattattatgtatgaccgcatcgcatgatcgatttgcgagcggggaagatagatgcatctatggttagagctgttcgaccctcaacggtgcacattttattattgttggtctgcgccgttcgaccctcgacattccttgtgcatgataattgctgcgcattatatgtaattattacctgtttattggcctatgaagttttaaattgccaactgaaatgccgaacatttaaagtgttaaatgtgaaaggaagttgatattacttatccttgatgttattagattgcatgtgatattgccgcttagtgtctcacttgactatactaaattgacttctatcaagtatctaattcgacctctcgtcactacctctatgaggttaggcggtatacttactgagtacacgttgttttcgtactcatgatacacttgctgtgcatttttattgcacaggtactttcacatcgatgtggccggcttggagacttaggcgagctgcatcatcctgaggcgattcgcagctgacagagtctccttaaatgtatttatttttattttaaattcgttgtccagttgtattttggacaagcattgtagtatctgtttaattcttagaaatttgctcatgcacttgtgacaccaggttctgggatgtgtttgggatgtattttattaaaatggaatattagactatcgtatttacttagcgaattttattcagttattatgtaataaagtgaaaggtaatgatttcaaaattgctaaacaagaaatttgacttaaccatttaatgatcggcttgcctgacagtggtgtctggcgccatcacgaccttatggattttaggtcgtgacaacttggtatcagagcactaggtttccttaggtttcacaagtcataagcaagtctagtagagtcttgtggatcggtacagagacgtatgtacttatcttcgagaggctacaaggatgttaggagtacttcccttcttgattcctcatcgtgcgatttgattccttttgaggcttatgcctacgtttcttcctattcaatcttatgcgtcgcgaagtgcttgctatgaatcatgaatttgaggacttgaaatggtgctacggatagggtgcatgatattttccatgcgtaattggttggggctgttgttgttgccttgcggaagaataatatgttgtttcagctcagtagctgtgtttctgagagccttgaggctatgcttagattgtcatgatgcttacaattggttatcgcgcggtgttgatatgatggtagaatgcttgcccatatgtcggggtaatgaatgacttcaagggaggtcttctgtcacgaccacaaatcctaataggtcgtgatggcgcctatcgtggaactaggctagccaaccatcaccttactgcgcttttgttcaattataatagttcacaattaaataataagcaagcaaccacatcataattaatataattatgtattagcgttcccatattaacctaaacaacctcccaagaactggagtcaatagtcatgagcatctaagaataaataaactaactctgctaaaactataatatatgtctctgaatcaaatgctaagactaaataaggaagggaaatggagaagctgtggacgctggtcagctacctcgaaatcccgtgaaatgctgctatcaactgcgtcagctactgctgcgaactagtacctagatctgtgcacagaggcacagcgagtctttatgagtacgccaactcagtagtaatgaaaataaatcacagtctgagtaatataaacacacagaacaaatacacaattccacaaaaccagtaaaacaccaagtcaccacgtgacattcatcaaataatgagttcgaaatcaatcttcagaaaaaccttcgaaacaagtgcaatatcagtatatctcggtaaaattctcaataaaaccagtgtgaaaacgaagtaaatcatagtttgaaaactcagtaaaatctttcataaaacagcccctcgggccaaaatcatttatcgtaaccattgcccctcaggcaccctcacaatcactctgcccatcaggcatccttacaatcactctgcccatcaggcatcctcacaatcactctgcccatcaggcatcctcacaatcaccttcataagccccgcgggcatcactcattcggtaccggcgctcactgggggtgtgttacagactccggaggggctcctacagcccaagcgcaataataagccacagcatggcataattcacacacaatataggcccgcagcctcactcatatcacatcatcctcacaatataggccagcagcctcactcagtcagacactctcaaatttcccttcaggccataaatataccgggttctcgacccaaaaacagtatttcattttcaagaagtagtatcaaaatactctgagtgtcaaagcaatttcacagaaacgactgagtgaataatcataatatagtagtgaggaaaatagtaaaagcatcctccaaggggtaaaaaaatcggcacgaggccccaaactttacagcccaaacatatcataatgtataaatactatttaagcaaaggcttaaaaatcggtttcgcaactcaatagtcgcctaaataggaaacagattccaaagtttccacctttttctttcaaaacccgtgaaagggtgcatagtccggggtttcatacaatcaggacatgatttaaagacattacttacctcaaaactagcccgaaactactccgcaatgcgcttgcctctcgaatcaacctccgaaggctccaaatctaccaagttcagatttttatcatcagtatgggcttaaggaacaatttccaatcgaaagatatcaattttactcaaaaatccgaaaccgggcaaaacccgacccccggtcccgcgtccctaaactcagatatatttacagaaaagtgttcttcatctccccacgagtccgtacatataaagaacaccaaaatcggagttcgtttgacccctcaaatcgacccttgaaggtctaaaatctcaagccccaaaatcctattttttctactgtttatcgtgaattaaaggctgggattaaggtttataatctcccataaacgcgttttaatgattagaatacttacctctatgaagaacaagaattttcctcttcaaaatcgcccccaagagctcttttccgtacaacaatggtgtaaaaataaggtttaaatcgcggaagggtttttatattcctgaacaggcatttccgctcttgtgaccacttaagcgcatctgcgctcccgcaggtgcggtccgcgcctgcgaccccttcacacacagccaaactccgcacctgtgaatgcaccttccgcacctgcgacctcgcaccgcacctgcgacctcgcaggtgcgacaatttcctcgcccctgcggtgcattatccactcagccaatcctcgcacctgcggagcctagtccgctcctgtgggaccgcgcctgcggctcccttttcgcaggtgcgaaaacaccagcaatagcaaatccgcagtttcaccaaaatcactccaaacttcccgttaaacgcccgaattcaaacccgagcccctcgggaccccaaccaaacttaccaacatatcccttaacatcattcaaacttatttgcactctaaaaacatcaaaactaacatcaaagcaccaaaattacatcggactcaagcctatgatttccaaaaacttccgaaactcgcatttgatcaaaaacccaaccaaatcatctccgaatgacctgaaattttgcgggcaagtccaaaatgacctaacgaagctacagtaaatctcggaatcccattccgaccctcggatcaaaatttcgcccatcaaccggaattcgccaaaatactaacttcgccaattcaagcctaattctacatcgggcatcctaaaaatattctgatcacactcctaagtcccaaatcacctaacgaagctatccgaatcataacatacgcattccgacgtcgtttaccaataagtcaactcttagttgacttttcccattttaaggctgttcttaaggactaagtgactaaattctcatttaaccatttcgatttcaagcctatcaactctaacacataaataatagagtaaccaacatgtattaagccactaacaacagttataatataggtttcgtgtaacgacagaccgggtcgttacattctccccgtcttaaacaaacgttcgtcctcgaacgagtctaaaaacatacctggtgtctcaagcaagtgaggatacttactctgcatttcccgctcggtctcccaagtagcttcctccactggctgacctctccactgcaccttcactgatgctatctccttatatctcaactttctgacctcacgagctaaaatagctactggctcaacctcgtatgacatatcaccctcgagctgaactgtgctgaagtctaacacaagagacggatcaccaatatattttctaagcatcgacacatgaaacaccggatgaacactcgacaagcggggtggcaaggcaagtctattagcgatctctccaaccttctgaagtacctcaaaaggaccaataaaccgaggactcagctttcctctctttccgaacctcataacacccttcatgggtgatacttttagcagtaccttctcacctcttccataaatgatacatcccaaaccttccggtccgcataactcttttgtctagactgcgcctcctgaatcaacttcaccttctccatcgcatcctgaatcaaatccgtgcccaacaacttagcctcaccaggctcgaaccaaccaactggagatctacacttcctaccatataaggcctcgtacggggccatctgaatactggactgatagctgttattatatgcaaactccgctaaaggcagaaactgatcccatgaaccaccaaaatcaatcacacaagcccgtaacatatcttccaatatctgaatagtccgttccgactgcccgtcggtctgagggtgaaatgcagtgctcaactctacttcggtacccatacctttctgtacagctctccaaaactgagatgtgaactgagtacctctatcagaaataatagaagccggaattccatgcaaccggacaatctctttaatgtaaataccagctaaccgctcggaagtataggtagtattgacaggaatgaaatgcgcggacttggtcaatctatccacaatgaaccaaatagcatcaaaacccttcgaagtccgtggaagcccaactacaaagtccatagtaatcctttcacatttccattctgggatatctaacctctgaagcaaaccacctggtctctggtgctcatacttaacctgctggcagttaagataccgtgctacatacccaacaatatctctcttcatccgtctccaccaatactgctgtttaagatcctgatacatcttcgcggcacccggatgtatagaataccgcgatctgtgagcctctgctaatatcaactctcgaataccatccacgttgggcacgcaaatacggccctgcatcctcataactccatcatcaccaatagttacatatttggaatcaccccgacgaactctatcctgaagaactaataaatgtcggtcatcatattgtctcgccttaatttgatcgaataaagaagaccgagaagccatgctagctaccacccgtggagggtctgacaaatccaatctcactaattgacccgctaaggcctgaacatcaagggctaagggtcgctctgctgctgagagataagctagacttcccaaactctcggctctgcgactcaaggcatcggccaccacattagccttgcccggatgatacaagatagttaaatcataatccttgagaagctccaaccatctcctctgtcgcaaattcaaatctttctgccttagcagatactgcaagctacgatggtcggtgaaatctcacactgcactccatacaaataatgtcgccaaatctttaaggcatgaacaatggcagctaactcaagatcatgcactaggtaattcttgtcgtgcaccttcaactgtctcgacgcgtaggcgatcaccctaccgtcctgcatcaacaccactcccaagcccactctagaagcatcacaataaaccgtataagaacccgaactagtaggaaacactaataccggagctgtggttaaagctgacttgagcttctgaaagctcccctcacattcatcggaccatctgaataaaatcaatatccctgtcaggtcaataccaaaatcaatatccctgtcaggtggcatgcctggcaggtctgcagggcatacgtccggaaaatcacggactacgggaacagaatccacagatggagtctcactactaacatccctcacaaacgcaagataagattcacaccctttctcaaccatacactgagcctttaaataagaaatcactctgctaggcacatgctctatagaccccctccactcaactctcggaactccgggcatagctaaggtaacggtcttagcgtgacaatcaagaatagcatgacatggggataaccaatccatgcccagaattacatcgaaatcgaccatactcagtaacatcaagttcactcgggtctccagacccccaatagatataagacacgaccgatacacacggtccacaataatagtatcacccaccggagtcgaaacatgaacagaagtaattagagactcacggggcatattcagaaaatgagcaaaataggatgagacataagagtacgtggaaccagggtcaaataaagccaaagcattactgtgacaaactgaaatagtacctgtaatcactgcatctgacgccatagcatcaggcctagccggaagtgcataaatacgtggatggcctccacctgttcgacctccccctctaggacgacctctagctgcctgaccaccacccctagtggcctgggtaggtggtgaaataactggggctgaagccgagggttgaaccctctgctgagctaaactattaggacgacggggacactgcctccactcatgtccgaactctccacactcataacaattacctggagtcggagatgaaaactgacggcaacctctgccaccctgataaccaccagacgaaccctgataagacgatgctcaggcgaagctctaagctggaagggcactaaaagatgaacgtccctgatgagcattgcgaggatcctgccccgacgataacccattgtatgctgggcgaactgactgtggaggtctaaatgtacgacctctgttgggctgaaattgccctctagaaggggcaccactgaaatttcctgatccctgaggcctcttgacctctctttcctcacgatcctgcctacgaaccgactcaatatctcgagcaatatcaacaacctgctcaaatgtaactccagacaccctctctctggtcatcaaaattcgaagctgatacgagagatcatctacaaatctaatcctctccctgtcagtagggacaatttcagacgcatgtctggctaactcagaaaatctcatctcgtattgggtaactgataattctccctgacgcagctgctcaaactgcctacgctgctcctctctgtgggactgaggaacatatttctccaaaaagatcgtggagaactgctgccaggtgagaggtgctgaatcaactggcctacgcctctcaaatgattcccaccaagtaaaagcagcacccgcaaactgaaatgtaacaaacgagactccactggtctccaaaatacccgcagtacgtagtatcctctggcatttatcaagaaaaccttgggcattctcaccctctgtaccgctgaaagtcggaggcttaagtctgctaaacctttccaacctacgctgctcatcctcaggcatagcagcgaccacaaaatcctgaacgggagtaaccgactgaactggggctgctcctggtgcctgaataccccgtacaacctgctcaggtgttcgggcagctggagtctgattgcctcccccggcctgagctgcagtggctgtattagacataacaactgcctgagccaaactggaacatgccgtcaatatctgagccaaggtctcctgaagacccggaataacaataggcactgccggtgcctgagcctgtcccgctggagaaccatcggcgggaacctgatcttggacgatagggggatcctgtggtaccaccccggctgctgcttgagccggccccctacctctaccatggcctcgaccccttgtgggtctggctggtgcctggtcaccctggtcggtattgcgtgtcctcaccatctgtgagagaatgaaacaacgtaagtttagattgcaagaatcaataaattggcacgaaagagttcaagaaaatagagatgtttcctaaaagttctgcagcctcttgaagataagtacagacgtctctataccgatccgcaagactctactaaacctgctcatgacccttgagtcctatgcaacctagtgctctgataccaacttgtcacgaccccaaatcctaataggtcgtgatggcgcctatcgtggaactaggctagccaaccatcaccttactgcgattttgttcaattataatagttcacaattaaataataagcaagcaaccacatcataattaatataattaagtattagcgttcccatattaacctaaacaacctcccaagaactggagtcaatagtcatgagcatctaagaataaataaactaactctgctaaaactataatatatgtctctgaatcaaatgctaagactaaataaggaagggaaatggagaagctgtggacgctggtcagctacctcgaaatcccgtgaaatgctgctatcaactgcgtcagctactgctgcgaactagtacctggatctgtgcacagaggcacagggagtctttatgagtacgccaactcagtagtaatgaaaataaatcacagtctgaataatataaacacacagaacaaatacacaattccacaaaaccagtaaaacaccaagtcaccacgtgacattcatcaaataatgagttcgaaatcaatcttcagaaaaaccttcgaaacaagtgcaatatcagtatatctcggtaaaattctcagtaaaaccagtgtgaaaacgaagtaaatcatagtttgaaaactcagtaaaatctttcataaaactgcccctcgggccaaaatcatttatcgtaaccattgcccctcaggcaccctcacaatcactctgcccatcaggcatcctcacaatcactctgcccatcaggcatcctcacaatcactctgcccatcaggcatcctcacagtcactcttcataagccccgcgggcatcactcattcggtaccggcgctcacttggggtgtgttacagactccggaggggctcctacagcccaagcgcaataataagccacagcatgacataattcacacacaatataggcctgcagcctcactcatatcacatcaccctcacaatataggccagcagcctcactcagtcagacactctcaaatttcccttcaggccataaatataccgggttctcgacccaaaaacagtatttcattttcaagaagtagtatcaaaatactctgactgtcaaagcaatttcacagaaacgactgagtgaataatcataatatagtagtgaggaaaatagtaaaagcatcctccaaggggtaaacaaattggcacgaggccccaaacatatcataatgtataaatactatttaagcaaaggcttaaaaatcggtttcgcaactcaatagtcgcctaaataggaaacatgttccaaagtttccacctttttctttcaaaacccacgaaagggtgcatagtccggggtttcataccctcaggacaagatttaaagacattacttacctcaaaactagcccgaaactactccgcaatgcgcttgcctctcgaatcaacctccgaaggctccaaatctaccaagttcagatttttatcatcattatgggcttaaggaacaatttccaatcgaaagatatcaattttactcaaaaatccgaaaccgggcaaaactgaccctcgggcccgcgtcatgaaactcagatatttttacagaaaagtgttcttcatctccccacgagtccgtacatataaagaacaccaaaatcggagttcgtttgacccctcaaatcgacccttgaaggtataaaatctcaagccccaaaatcctattttttctactgtttattgtgaattaaaggctgggattaaggtctataatcgcccataaacgcgttttaatgattagaatacttacctctatgaagaacaagaattttcctcttcaaaatcgcccccaagagctcttttccgtacaacaatggtgtaaaaagaaggtttaaatcgcggaagggtttttatattcctgaacaggcatttccgctcttgcgaccacttaagcgcacctgcgctcccgcagttgcagccactcgtccacgcctgcgaccccttcacacacagccaaactccgcacctgcgaatgcacctttcgcacctgcgacctcgcaggtgcgacaatttcctcgcccctccggtgcattctccactcagccaatcctcgcacctgcggagcctagtccgctcctgcgggaccgtgcctgcggctccctttccgcaggtgcgaaaacaccagcaacagcaaatccgcagtttcaccaaaatcactccaaacttcccgttaaacgcccgaattcaaacccgagcgcccctcgggaccccaaccaaacttaccaacatatcccttaacatcattcaaacttatttgcactctaaaaacatcaaaactaacatcaaagcaccaaaattacatcggactcaagcctatgatttccaaaaacttccgaaactcgcatttgataaaaagcccaaccaaatcatctccgaatgacctgaaattttgcgggcaagtccaaaatgacctaacgaagctacagtaactctcggaatcccattccgaccctcggatcaaaatctcgcctatcaaccggaattcgccaaaatactaacttcgccaattcaagcctaattctacatcgggcatcctaaaaatattctgatcacactcctaagtcccaaatcacctaacgaagctatttgaatcataacatacgcattccgatgtcgtttaccaataagtcaactcttagttgacttttcccattttaaggctgttcttaaggactaagtgactaaattctcatttaaccatttcgatttcaagcctatcaactctaacacataaataatagagtaaccaacatgtaataagccactaacaacagttataatgtaggtttcgcgtaacgacagaccgggtcgttacatcttctcagagtgtaaagtcaacatttcagtattttagttcaggcgaaggaagggaagttggactatggatgttcaagtctgggggataaggtaatgagacttggtgttatcgagcaaggtggagtattcacctgtggtgtgatatcgtcgtctttgatcgaatagaatgtgttaagttcgctggtgttatggttcttcagttgcattgggtcatagttttgtgaagtggtattgaagaagcggctgtcataaaccgtggtgtgtggtggttcaagtactgaatgaatatttctaatggaggtatctcgagaaagatgatcttcggggagtcgaagttatggtgatctgctggttcaggtgttgcatagaatggtattgaattgaggccgcaactgagaagcatgcgatgaaggaagacatgtgaggagtgtcaagtgcggctaaatctctaaaatgccaggcatgagagacggaagtcaggtagttgcttaaaagaatgagtttaactaatgtgggagagtggcagcgtagcatatgagttcagtggtaagactactgcctatcttgaggaaacgtttggagtgatttgagaagttttagtggacgatgattgggtccacgagcttaagttgaaatgtagttattccggtgaaggttggatataacaaagatgagttatcaggaatgaagaaggatgcaatgtggcgatgaatttgaaggtattgtcgcgcatttagtagatgcctatgaggagcagacagactgataaagttgatgaatgagaacatgtttaggatgggatgttgatgttgtagagagtgtgcagtacaacgtcgttggaaggtgtcagttggtgaattccacaggtgggttatatcctgtgaataggctagcagttgtgtggtgggcaagttctgtgaggaattctagttgcgattcggtaggaggccgaatatgtgaaagatgctagagaatttgagtacccaaaaaatgctaacattagaatttagaagaatttatcgggttggttgagcaaggtcacgtcatcaatgaagaaagaatttcggtggattccagagtggtgcaaggagtagcttcaggctatgtgggagagtcccaccgcctgcgattgggttgcaggattatatcctcatggggttgcggattgtcaacgtattgaaagttattacagctaagggaaaggagtaaaatggtaattatgcatgggatttgataaatgtgtctaaaagttggccctattggaccagggttaggctttggaagattcagaacttatgcttaaggcataggcaagctgtaagggtagtgacctagtcacgtgcttcattgagaggggtgttcatgtgctagaagagccttggagttgattgaattcggggccagtcagagtgggtgactctcaatagcggtcctaacgaattcgaaagttaaaggatgcagtgtttaagggttttaggcagcactacgattaagaatcgagcttttgcagtataatttctgagaaagggaaaatgattggagtgttctatgctattttcagcttgcaaaagagaaatggaggagtgagagaaataaactccggattgtagaaagattatcaggagggtatgagatggtttgcgttatttagacaacacggtctcgtgaatcaaggccactcgagatgagtaaggattgagtttgttatgagttgtgtcgcgccctctttttccttaagcggagatcgggtttatgacattctgacaactcattttaaaggaagagggttaaaagaagagtcgccacctaacgattttttaaggtgcgttagggaacctagagtaattaactcatgagactagttcgcgttaccagagattgggtaaggaattgaaattatcccaaggggaaggtattaggcacccctcaggatccacaactgtggtttccggccaaatggttttcgtgaatttgtacaataagcaagtaacaagtaatggctcaaataagggggggatttcaaataagcattgaagttattaacttttgaaagaactaataaaacatttgagataaatacatcctaggtttgaaacaatatggatcacatcaatgcaatacccgatagacactcctcagagaggggctacacgtggtattagcgcaccggtcatcatatccatattctaccctttcccaccccgtgaaggtaattaaaatgtgtgttggtcacgaactttattgcttgctattacccgtcccatcctatcagtaccggaggaggctaggactagtattcttaaggaggtactaggttgacccctgggtttaaaggacaaaattctaagcgacaagcaaagacaattaggactgcaaataaggggaaaacaaataggagcagatatgaggcccaagtattcctccacaggttatgcacataattagcacgactcaaacacaagtaaggcctttctaacgtcaggacctaaggcatgatgtctaggtgagactgcaatgacgaggcagttttattactgatttttagagaaggaattgcaccagtttctgaatactgattttaacctgttgttagtcaaacagtatgtataaaaggggtatactttcaattttaacaagtttaatacctaaggctttcgtaggcataccaatcactacaaaatcgctcaaatttctctgttctaagtgtccagcttttagaaaacagttactaaataggggtgaatatttttatttataatcaggctagggggtgttaagcgaatattaatgcaatcttaagaggcatgatatctaatgcatacaaggttcaagatgatgcaagacctacacatgatgttctaaatgcacgagcgtttcaacgtcataacgtgttttagaaagatctatttattaacacattgtttttgacttaaagaagaacgtagcagtttcacagagaaccagttctttgttagtttgctgagcctaatacatgattttctaggtgttcgtagcagtgtatacagtgatgcaaaatatgttctaacgcaggattttggcataagtgacatgaacatgcttaaaacaatatcctaagggacgtgatttctaatgcaagattgatggttgttagtgttatcatttatcctagaaaaagcaggatttctaaggtgatgcaattagggcagatgagaatgctgaagcagtaatattgtgatagccatttttgttgttattcatcctataaaaaggatttctatgtgtaatgagatgctggatgcagtaaagctgagcaacatgatatgtatggcatgcttgttgcacctagacatggttaccattgcacacatagggaaagtaaacctaaggcatgatctatacccatacttatactatagcatgcatattcccacccgtttcactatccaaccccaaatagtcgtttacaaattattacatgccaggaatgatgaattacataaccaaaagaaaaacaagaagttatttctatagggagccttcatttaggcccagattttccaaatctcaatgcctttagtatttcatagccttttatagtccgggcgagttcaagttccctaaggtcctcatgggctcccgggcaatgctcacacccaaacatagtcaccaagaattaagcatgtgcagtgtggaaataccagcctcagtgtgtcaaagttcagagggaactcaagaggttcccaaagcagtgctcacattgaaggggtgcaacttaagagtctaggagtaaagtgaagtgcgagaggtgagtttgaaaaaaaaaggattttgaaagagacagtgttgaaagggacttagttgaaagattttatgactaagagagttgtttgaaaacagcttttcgaaaacaacagtggaatcatataaatgacatgccaatcatagaaccctaacaaatcccaacaatactcaaagaacagccttcacacaaggatcatgggagctggggacaaatagatcacataacagacagaggtccttgcaattagtgcagatggtaatacatagtttcaagagtacttgattaaacatagttgcaaaaatcagagaagtttagaggattcaagggaatcaggagacaacagatcacaggaatattgaacatgacattaaaacaacttggaacaatggcccaatagaagcatactaggaataaacaacaacatataagtattagtctggttactaattcaacagagcatgcaaacactaaagagataagacatggctagcatacatagatggagcaaagaggttaatttcatattgaacaacataaccacagatataaacaaatcaagaatattaactgaagcagtaggaaactcattggtttgaaacttgaagaaataatcacaaagaaacaaggattactgatggggaaacagacacacatacaaatcgaaagaaaagacatactcagaatttaggacacagtgttaaaactaaagttttaacataataaatcatgattaaagtgataaaacgtttaagcatatgagaaaatcacttgaactttgagaaatcgtttgaagaaaaagtttcagaaaccctaagtaaaaacttgtttaaaaaaaatggaaaacctttaagaaaaaatgtaataatactcgtaataaacccggatctactgtagatataagggaataggaagtttcacatgttaggtatttatagaaaacctctgagaggacgaaaaagaaccccgaacaacaatgacttgagcctcagaggtcatagcctttctcagaatcaagcttttggaggcttgaagtgaacaggggcaccaggggtgtgagcagacgagttctcgccctttaagggccttagggaggacatcaccggcataggagagccatgggaggcaagagggagaaggcttcaaggtctccaacaaaagggtggacggagaagatgaaggagctcatcggaactgaagagacggaggtctccagaagagactagagagagagagacgagagtagagagatgaggggtcgtgagagaatgaggggtcggaggggggggggggtagttggggtttaattatggtaacaaatatctgggccgttgatctaatttgatcaatgactcagatggtttaaaattgggccgggtattcaattggtctgggctgggtattcaattgagttaattaatcaggtgggttggggctaaaattaggctagaacttgaataaaatgtggctagttgttaaatacccattaaaatagataaataattaatacaaaatagctaataattgtatagaatgaaatcaatgctaaataaatgagattagagtaattagctaatattaaatataaaaatgactagttattgaattaaaaatagcagaatgcgctattaggccatggttgcaaaatttgtataattatagttaaatagtgcctaattgattaatttgtgaaataattaaatcataatagaattgaataggattaaaaagatatactgagctgggaaacatttgaaaactttacttacaataccatttatgaataattattggatataaaacactaaataaacaggaaaataatttgataaaaatatggaaaattatggaaaaataccaatgattataaaaggtgattttgaaggtatatatgcaagtttgaaaataatttgagaaaaaattggatatcaacacctgcccctctttgcccggaaaggatgaaagagttgtcgggtaaagatatgatggccaattttgaccgagtggaaatagtttgaaagatttaggccgcaccctggtttgagctgcctacatatccctggttttacaggaatcaggccatatatagttcaggagtaatcggtgaagtgccagtgaagttttataaggatggacgcaaggtgcaaggtaaggtaaacaaaatggctcatggggtagttaggagaactggagcggggccgctcctgcctgactggctattccttgccggacttcctgcaaatgaataacaagcgtatattgtgcgtaatttaaacatgatgcagactcccattggactatgaacgatgtcttcgaacggttgcggatgacgtccttagacatgatgtcctgggccatgagtcgcttgatgcgggatttgcagtctatgaaatgatgttctcgggccatgaagatggtgcctccgaacaatgatgcctttgaataatgatatgcaaactgataaaagagatcctcaggccatgacatgatgttctcgggccatgaagatggggcctccgaacgatgacgcctttgaataggttggtgatttttcttcccatgaaaatgcaatagtatgatgttaacaagacaaagcttagtcttgcaaattaaatgggcagagcttatcccaaaaggaagcaaagtaaataatgacagagacagtggttgctttgaaaagtaaatgggaggcaacgtttagcctcggaaggcagaatggtagccttatgcaaatgcagatggaggtagcgtttaacctcgaaaggtagaaaggtagccttatgcaatgcagatgtagatggagacatcattaatctcgaaaggcagaaaggtagctttaagcaatgtagacgcagatggatacaacgtttagtctcggaaggcacaaaggtagccttatgcaatgcagatgcagatggaggtagcgtttaacctcggaaggcaaaatagtagccttatgcaatgcagatgcagattgaggtagcgtttaacctcggaaggagaatagtagccttatgcaagaaataaatgtagatggagacatcgtttagtctcagaaggtagaaaagtagacttatgtatgaaataaatgcagatggagacatcgtttagtctcggaaggaagaaaggtagccttatgcaatgcagatacagatggagacagcgtttagtctccgagggcagaaaggtagccttatgcaatgcagatgcagatggaggtagcgtttaacctcggaaggcagaatagtatccttatgcaatgaataaaatgacagtaggaattcttagctggtgataaattgcggcaccgtgattgttgtgagtattgaagcatcgtttgtgctgataataaatgtcgggatgtgtgacgaatttgagaagcgtgtttttgaacaatatgtgttctccgagcgggtagtatgtcttggggactttgccatctatgtgtctgcatccaaagaaaggtcgtaagttctataaagggaaggttagttcatatccctgctggctttgcttgtcgtgtttgcttgattgtgatgatactgtctgtatcaccgggggtagcgtttgctaaacaagttgtttcaataaatatgcatgatttgtaaaagtataatataagcataaaatagttttagatgaaccgacaaccgtgacgcggtccgagacattgtaacctctcctgccacggaattttgagggtcctcaaaattcggtcccagtttggtaggtggacacttctgaccatcgctcgtgcggcgattagctgaacttgcttcagaattttgagggtcctcttcaaaattctgcccaagtttccaattgtggggggaaatgagatttttattgaattgtgaccgaacccataggcctgcctacgtatcccctcttaaacgggaatcatgccaggcgtagttcaatttatattgttgataaaaatcataaagagttacacatagtagcgtttgactgcatctgaattgattggttttggccaaacttctccgtccatttctccaagtataagtgctcctcctgtcagcactctgtgaaccatgtacggaccctgccagttgggagagaacttccctttggcttcatcttgatgtgaaaagattttctttagcaccagctgccctggtgtgaatcgtcttggcttgactttcttgttgaaggctctggtcattttgttctgatatagttgaccatgacaaactgcgttcattcgctttccgtctatgagggctagttgctcataacggttccttacccattttgcgtcgctgagttcagcttcttgtatgattctcagagatggaatctcaacttcggcaggaataacatcctttgtaccataaaccagcttgtagggggttgccccggttgatatgcagactgtggtgcgatatcccagtaaggcgaatgataattctcatgccattgcttgtgcctttctatcatcttccttagtatcttcttgatgtttttgttggcggcctctacaactccattcttctgaggtttgtatgctgtgtagttcttgtgtatgatgttgaatgtttcacacatggatttcatcaagtcactgttgagattagaaccattgtcggtgatgactgattctggaactccgaactgacaaataatgcagtcgcgaacaaagtcggccacgactttcttggtaactgctttgtaggaaattacttcgacccatttagtaaagtaatcaatgccaaccagaatgaacatgtgtccgttggaggcggcaggcacgattggtcatatccccatgtatctaacatcagtggcattttcgtcgtactggatgcagtccgttcccatggtcatccagaagtaaccagctcagagtatcttctttgctagaacaaagccgttcatatgtaggccgcaggtcccaacatgaatttcttccagtaattttgatgcttcttttgcgtcgacgcaccttaacaacaccaaatcaggagtcctcctatataggattcctccgctgtgaaagaaattgttagacaatctccgaagtgtgcatttctgagtggcatttgcaagctccgggtattctccttttgccaagtatttcttgatatcatggaaccaaggatttccatctgcttcttcttcgacatgggcacagtaagccggctgattgtggatttccactggaatgggatcaatgaaacttttgtctagatgctgaatcatagataatagggtagtcaaagtgttacgccccaaagccgagggacgagaccggcgcctaaccgggtgaacccagtcaagcggacctagattgcctttcctgcccaacgtattaccccgcgttcacaacatgcattatttcgtgtaagttagccgattttattttcaaagtacattttacaacatatctccatttgtttcctcttttaacattccaacgattgatatccaaaaatacataatacattcataactttccaatatgatccacggttccgagtatgtactgttactacccaaaaatacatatatacacccacatcatgtctacggagcctctacgaatactagggattttacataacttgccggtaacaagaccccgactatacctttacaacataggaaaaagagggtggtataatccacacacggccccgaggagaagaggggctcaccacaactgttgtagagataaagaggaggtaccactaacggcgggctgagctacctgctatggaaccacctacatccatataaaagatgtagcgccccggcaaaagggacgttagtactgtggaatagtactagtatgtatgaaaaaactttatcccaagtacaattaaccaatatacagataagagaaaggacagtaatatgaccaacaatcaaaacacacggaaagggacaatcaaagtcaacaattttacaatctctcccttttcctttccaacaccaccatattcacgagtttcgtcaatttcatatcgatagtgataaagatcacttttccacccttattacctcggccacccttatcaccacaacccacaccttattacttcgtgttgcggcgcgcaacccgaccctgcctgacaatttatatttcataacaacaacaccaaacaatttcatcacaagggccttcctttcaaggatcacaaattcaacaacaacaccaaacaatttcatcacagggccttcctttcaaggatcacaaattcacatttaacaattcatttacttgggctcaaggcacccccaaactttcatcaagcagcaatttatgcacaaggtgttgccataaccgttcaacttatttacaatacttcatatcaataacataccgtatgcttgccacaacaagagggattttacaagggttaaagttagccatacatacctggagtcgaaatccctttttaacttttactcataaatcaccgaaccgactagtaccgtcaatctagttcacaatgtaacatattcaactcagaactggaaatcatgcatacaatctggactctcttaagcattttgccgaacactatgcgaccccattagattaccaaccccgtctttgtgaaatttacgccaaaccactccctcttactagattaacaccattattaaacatgcatgcaaggtcttagttagtatattcaagaatcaatccatgctaatcctccatttgcttaaaatcataaaattaatggaaaagggttgggaacccttacctgttagaatgaggaagaaggagattactcgaaatatcaggcctgagggactttgaaaatcactttggtggaagaaccactttctctctcaagaactcccctttccttctctctattttgtttagaagacttgttaagaacgaaggggtggggtgttttaatgaactgggggtcgggttttaaaattagaaaaattaggagcccgacacaggaatgcggtcaggaatgtgatcgccttcctgacatgcggtccgcagacgggtcgcagaatggccctcaagatgggccaactttaaaaacacattgtgcaggtatgcaaccactatgcggtccgcatacacgttatgcgatcgcatagtgcgtcgcataacctccctcaccaaaaaccaatgggcaagaatgcgacaactatgcggtccgcataaccagaatgtgatcgcattctggaccgcatagttgtcctcaatttgggcagtgtcctgcccaggtatgcgaccattatgcggtccgcatacccgttatgcgatcgcatagtgcttcgcataacgcccaacttctggaaaattacatgtttcaacttccggggtgtttttattcaaaataggtccgttttaaggatttatacaattataacaactcggggacttattcgggcattatcttaaacaagacattttacgggtccttacattctccccctcttaaaatcattcgtcctcgaatgaggatttttgaaatcgtttggttttgaaaacatgatatgcaaacttccagatttacactaactccaatattttcaggaaattttgccagagtttcctttgtatttagacctatctacctgtcagagagcctcctgaaacacatttccaagcatcattacacagtttctactatctctacaactggtatacaattcatttcctcaacacttgcacatatccaatcactttgacaactacacatagttcattctctttacatcacaaattagcatatgattcaattagtggcacatacttgcacataatttggtcattttagtgaggcccatacgattaaatcacctcaatacaccgtatgtatatttcaattaatcacactactattaatcatttgcctatcacataagtttcacaaaactttcatttacttcaagggtttcacaccacccaattaataacatcatatacaattttagcacgcattggaaagttacaacaataaggcaattaggggaaaatggggtgcctttccacgaatctgaacacaacatcaaattgccttgggataatagttcgcacgatcactactagacttgttcaaacaaatggggatatttttctctcatttctttctctgcttcccacgtggcttcctcgacttgttgacttcgccacaacacttaaacagaagcaatctctttatttctcaatttacggacttgcctatcaagaatagcaaccggagcttcttcgtatgataagtctttattaacctcaatagtcccaactagaatgatggcggatggatctccaaccactttcttcaacatagacacatggaacaccgagtgcactaatgacatttcaaggggaaattccagcctataagccacctgtcatatcctttgagcgacccgatatggcctggcgtacctagggctcaacttccctctcttcccaaaccgcatcactcccttcatgggggacaccttcaagaacacccaatcatctacctggaactccaattctcttcgacgaatgtctgcataagatttctaacgactctgagcagtttccaacctctcctaaatgactctaactttttccatagcttggtgcacaagatctggccttaacaattctgcctcaccggcttcgaaccatccaatcggagatctacacctagcatgaaagttgttattgtaagaaaattcaataagcggaaaatggtcatcccaacaacctttgaaatctaaaacacaagcccgtaacatatcttcaagtgtctgaatagtccgctctgcttgaccatcagcctgtggatggaaagacgtgctgagattcacctgagtacccaaaccttgctgaactttcctccaaaaattacctatgaactggccccctcgatccgagataatagaaactggagtgccatgaagtctgactatttccgtgatatacaactgagcgtaccgttctgcagtatcggtggacttgactggcaaaaaatgagctgatttggtgagtcgatccactatcacccaaattgagtcgaacttgcgttgagtgcgaggtaaccctaccacgaaatccatattaatcatttcccatttccatgtcggtatttccataagctgagttaatcaaccgggccgctgatgctcaaccttcacttggtaacgattcggacatctagacacgaagtctgccacacccctcttcatttcgctccatcaataaatttcccggagatcatgattcattttcgtagagctgcacagaatacatggaactatgagcttccgccattatcctctcccgaagattatccacatctggaacacataccatacattaacatcgcaataccccatcatcgttgccgagtgaaaatgccagaatcttgttattcagaattgcctccttcaactgtgccaatgctggatcaataaactgcctttctttgacttccgcaacaagtgacgattctgctccattatgcaccataaccgcaccttcgtctgaggtcgagagacaaacccccaaactgtccaattgataaagctcccgagctaagggcctctgatccgcttccaaattagccaaactacccatagacttctgactgagagcgtcggccaccaccttcgccttccctggatggtacaagatgttcatatcataatccttaagcaattctaaccacctctgctgccttagattcaactccttctgcttgaataaatactgaagactcctgtgctctgagaacacgttcacgtggatcccataaagataatgccgccaaatttttaatgcaaacaccactgccgcgagctccaaatcatgcgtcgaattcttctcgtgattcttgagtttccttgaagcatacactataaccttcccatgttgcatcaacacacaccctaaaccaacccttgaagcatcgcaataaaccataaatccctctataccttctggcaaggtcaataccggtgccgaagtcaatctcgatttcaattcctgaaaactcttctcacaagcgtcggatcactggaacatcactgctttctacgtcaatttagtcaatggggaggcgagggtagataatcccttcacaaacctccgataatacccaggtagacccaagaaactgcgaatctctgtcggggtcgtggatctaggccaatatttcactaccgcgatcttctgggaatcaacctgaatcccttctctggaaacaacatgacccaaaaaggtgactgattctagccaatactcacatttcgaatatttagcatacaactggtgatgatgaagagtctgcagaacttccctaagatggttaacatgatcctccaaactccgcaaatagacaaggatgtcatcaataaaaacaatcacgaaggatactagaaatggcttgaaaacacgattcataagattcatgaaaactgctggagcattggtcagcccaaacgacattacctaaaattcaaaatgaccataacgagtcctgaaggcggtcttaggaatatcctgctctcagatcttcaactgatgatacccagactgtaaatcaattttggagaagaacctcgcaccttgcaattaatcgaacaaatcatctattcgaggcaatggatacttgtttttaatatgtgaatttgttgagctgccgataatcaatacacatccgataatctatacacatgacgaaaagaatcgaagcaccccatggcgacacactcggccgaatgaaccccttttctaataaatccttcaactgttccttaactccctcaactctgctggcgccattctgtatggtgggatagatattggttgtgtatctagtagtacatcaatcccgaaatcgatctctctatctaacgaaatccctggaagctcgtccggaaatacttcaaggaactcattcacaacaggcacggacttgggagcaggcacctctgaagtggtgtccgcaacccggaccaaatgatagacacacccccttttaatcatcttcgaggccttaaggtaggaaataaacctacccttcggcaccacaccatttcccttccactcaacaaccgacttattacgaaactctagcttcatgattctggttcggaagtcgagtttagcgaagcacgaataaagccagtccattcccataataatatcaaaatctaccatcccaagctcaataagatcggcgtggtaacgtgatcacataccgtgacaacacaattcctatagactcgcgcggctgtaataaaatcaccaaccggagtcgatacagagagcagctcatgaagctgttcgggttctatcccaaaacttgaagcaataaacggggtaacataagacaaggaggaccccagatcaatatgagcataacaatcaagtgcttgaacagtcataatacctgtaacaacgtctggagaaccctccgcgttctggcgaccactcaaagcatagaaccgattgggtccacctctacctcgagctccacccctaattgcaccacgccccgctgttgctggaggacgccctgaagatgtggtgactgaagaaccggatgactgagcaaaacccctacccctgccctaactaggcgcacgacaatcccgctgaatatgacctctcactccacacccatagcacaccaagatatccagataataagactcggtatggaacctcccatacttggggcacggagccctcccctactgttggaacctccctcctgtgcgacctgactaatggggtctcctgctgtttgatcctggtccccagcgactactctgttggaaacggtgcactgatggcggtgcactggctgaggactgtgcataggactgggatggcctgatgaccctctcccacgaactggtctctctcctccatctgaaattcccgagtggcccgctgaccgggccctgctactactctctctctctgaccttatcttcaatttcctagcctctgtagcctgggcgaagcccacaatcttcccataattcatgtctgagtgcaaggcagctgtagcagcttcattcacaaccaagggactaaggccccgaatgaaacatcgaaccctggcatccatagtcgacaccaagtgtggagcatatttagacaaccgcacgaactccatgtggtactcccacacactcatattaccctgcttgaggacctcaaactctgtagcacgggctgccacagtctcggcaggaaagaagtgatccataaaagcattcacgaactcgtcccatctcgccgaaggacttccctccccacgggaagcctcccacatctcaaaccgggaatatgttgctccccttggcctgtacgaagctaactcaaccctttttgtttctgtagccttcatcacccgaagggtattttacatctcatcaagaaaatcctgtagatcgaccgctggatctgtacctgagaactctagaggggccaaccgcagaaactggttgactctggagcgggcggaatctccctgtcagctggaggacgcgggggtagcatgagatctttgggcctgggcggccacaaactgagtcaacatatgaatagctcctctgaggtccccatcggacgtaccgggaccggaagctggaactatataggggttaggaatatcaacaggagggattgcagcaccctccgccaccgcaggaacatgaacactttgatccggaatagaagggtcaggtagattcaaggtcggggagtcactctcacccgcactatctggtacagaattcacagccacacccggggtggcattggcctcaaggccgagttgagctctcttctttggtgccattactgaaaattttagaacaaagcatgaattaggcaaggatattttcactttccagttcaccgcatgatatagaataacaatgaaagggtaatttcctaaatgtccatgtagccccctaattatagatgtggtcgccaacacaccgataagaagggctctactagacacggctccgagacatcctaggactcttttaaagaccttaggctctgataccaagtttgtcacgccccaaagtcgagggacaagaccgacgcctaaccgggtgaacccagtcaagcggacctggattgactttcctgcccaacgtattaccccgcgttaataacatgcattatttcgtgtaagttagccaattttagtttcaaagtacattttacaacatatctccatttgtttcctcttttaacattccaccgattgatatccaaacatacataatacattcgtaactttccaacatgatccacggttctgagtatgtactgttactacccaaaaatacatatatacacccatatcatgtctacggagcctctacgaatactagggattttacatcacttgccagtaataaggccccgactatatctttacaacataagcaaaagagggtggtataacccacacatggttccgaggagaaaagaggctcaccacaactgctgcagagatgaagatgaggtaccactaacggcgggctgagctacctgctatggaaccacctacatccatataaaagatgtagcgcccccggcaaaagggacattagtactgtggaatagtactagtatgtatgaacaaattttatcccaaattacaaataaccagtatacagataagagaaaggacagtaataggaccaacaatcaaaacacacggaaagagacaatcaaagtcaacaattttacaatctctcctttttcctttccaacaccaccatattcacgagtttcatcaatttcatatcgatagtgataaagatcactttttcacccttattacctcggccacctttatcaccacaacccacaccttattacttcgtgttgcggtacgcaacccgatcccgcctgacaatttatatttcataacaacaacaccaaataatttcatcacaagggccttcctttcaaggatcacaaattcaacaacaacaccaaacaatttcatcacatggccttcctttcaaggataacaaattcacatttaacaattcatttacttgggctcaaggcaccccaaactttcatcaaagagtaatttatgcacaaggtgttgccataaccgttaaacttatttacaatacttcatatcaataactttaaacaactaccatctttgcacataataaggtaggcacgccaagtcacaattcaaaatctcatctaacacagtggggtggcattcaactagacagtcaattcacatattttcatataagtacacataccgtatgcttgccacaacaggagggattttacaagggttaaagttagccatacatacctggagtcgaaatccctttttaacttttactcacaaatcaccgaactgactagtaccgtcaatctagttcacaattaaacatattcaactcaaaattggaaatcatgcatacaatccggactctcttaagcattttgccgaacactatgcgaccccattagattaccaaccccgtctttgtgaaatttacgccaaaccactccctcttactagattaacaccattattaaacatgcatgcaaggtcttagttaatattttcaagaatcaatccatgctaatcctccctttgtttaaaatcagaaaactaatggaaaaagggttgggaacccttacctgttaaaatgaggaagaaggagattactcaaaatatcaggcccgagggactttgaaaatcactttggtggaagaaccactttctctctcaagaactcccctttccttctctctattttgttcagaagacttgttaataatgaaggggtggggtgttttaatgaactggtggtcgggttttaaaattagaaaaattaggagcccgacacaggaatgcggtcaggaatgcgatcgcattcctgacatgcggtccgcagaccggtcacaaattggccctcaagatgggccaacttttaaaacacactatgcaggtatgcggtccgcatacacgttatgagatcgcatagtgcgtcgcataacctccctcaccaaaaaccaatgggcaagaatgcgacaactatgcggtccgcataaccagaatgtgatcgcgttctggaccgcatagttgtccttaatttgggcagtggcctgcccaggtatgtgaccattatgcggtctgcatacccgttatgcgatcgcatagtgcgtcgcataaggtccaacttctggaaaattacatctttcaacttccggggtgtttttattcaaaatatgtccattttaaggattactacaattataacaactcggggacttattcgggcattatcttaaacaagaaattttacgggtccttacacaaagcatcggcgaactcattttggattctaggaacatgccggaactctatcattgtgaaccactttctcaactcctgaacatgatgtagataaggtagtatcttggaattcttggttgcccattctccttgtatctgatgtaccaataggtctgagtcaccaatcactaatagcttctggacgttcatgtcaatggccatgttgagtcctaaatgcaggcctcatattcaaccatgttgttggtacagggaaatctgagtctggcggatactggataatgctgaccggtctctgataccaagactgctccaataccgacacctttgatgtttgctgctccatcaaagaacatcctccagccgtcgtaggattatgcaatgtcttctcctacgaatgatacctcttcatcaggaaaatacatttttaggggttcatattctccgtccacaggattctcagcaagatggtctgctagtgcctatccctcgacctctttttgagtcacatagataatgtcgaactcactcagcaggattttccacttggctagcttgctagtaggaatgggcttctgaaagatgtacttcaatggatccatccttgatatgagatatgttatgtaggcacataagtagtgcctcagcttctgagcgacccaagtcaaagcgcagcaagtgcgttttccagcaaagaataccgggcctcatacggagtgaacttcttgctgagatagtaaatggcttgatctttcctttctatttcattatgttgccctagaacgcaactgaaagttccatccagtacggcaaggtagagtagcaggggtctacctggctcaggtggtaacaagaccggcggtgttgagagatactccttgattctgtcgaaagctttttgacaatccttggtccacttagtcgtagcgtccttcttcagcatcttgaagatcggctcacagatgactgtagactgtgctatgaatcggctgatgtaattgagcctccccaaaaagctcataaaatctttcttgttctttggcggtggtagttactgaatggctttgacctttgacggatccaattctattccccgacggcttacaatgaatcccaacaacttcccagcaggaacctcgaatgcacacttcgcggggttcagcttcagattatattttctcaccctgttgaataatttcctcaaatcctccatgtgatcagtagctttctttgatttgataatgacgtcgtccacatacacctcgatctctttgtgaatcatgtcatggaatatggtagtcatagccctcatgtaggtgggccctgcattctttaaaccgaacgacatcatcttgtaacagtacgctccccggggcgtaatgaacgccgttttctcaacatattcctcatccatccaaatttgatgataactagcgaagcaatctacgaaggactgtaactcatgtttggcgtagttatcaattagaatgtgtatgtttggcaaggggaagccatctttcggacttgcccgattgagatcctggtagtcgacactgactctgaccttcccatctttctttggcacatgtatgatgttggctaaccatgtcgggtactcaactacccggagaactttggcgttgatctacttggtaacttcttctttgatttttaaactcatatcaggtttgaactttctgagcttttgctttaccgatggacatgtcggattggtcggcagtttgtggacaatggacgtacttaaaccagtcacgtcgccatatgaccaggagaatatgtcctcctactcctttagaaactgtgtgtactctttcttctttgacagtgataaatggacacggatgcgtgtttccttgacgttttctgaatctcccaggttgacaacctcagtctcatccaagttgaacttaggtttattttcaaagttttcgacctctttaacgatttcgtcgggtatatcgtcttcatctgaatcaatgtccgtttgttgcgttgccttattgcacgtcacagtcatcagttcatcaagacaaaaaatggtaatgctgtatagataaagtaatgagagaaaatggtaacaataaatatcggattcataaagaaattggaaatgctttgataaattgaataacttgttttgaacattgaagatcttattgcgggaattgaaaaatgcagaaaaaggaaaatcgtttactaaataaaatagtaaataatgcttgtttttagccttgctaccccgaggcttggcgggatttggtggttctgatagaccagttcttgagatatgttcccttgtttactgcctgtacggaagagccttcctccccctcctcccggagaacaacacagcaatccatatcactatcttccaaaaacaaattcctcgttgctgcaagtgcttccttttcatctgatccatagatgatgtcggcctgcttgaagctctgctccagatgaggtatcggctgttccaggaggtggtgatgaccgcgccatggtggcgacaagtttctgaattcttcccatgtatactcataccccagaccgaaagtagtactatgtttcttgagttttatgggcttcgtgatcccttagaggttcttacctagccctttgcctggctcgtaccctctccagttcaggatgatctctatcttgctatcccacccattgtccttgtcgatggcattgactcgttcaatatggtgataagttcctccacccattttctatttccatcaatcacagggatagtctggcgactgtaaatagggttgctaccgtcgccgtggatgatcacctcttggtgattccactcgaatttcaccgcctgatgtagtgttgatgctacagccccagcagcatggatccaggttcgtcccaccaacaagttgtaggatgccgacatgtctattatctggaagtccacctcgaaccaggttggtcccatctgtagtcatagactgatttcctccatggtagatctttgagacccgtcgaaggctttcacgttgattgttacctctcttatctcatgtagtcctttacccaatttcttaagtgttatcaatggacaaatgttaagactggaacctccctcgatcaagatccttgtgatgaaatgatcttcacattgcacggtgatgtgcaatgctttgttgtgtcccaatccctcaggtggtaactcgtcttcatgaaaagtaattttttgactttccagtaccttgcccaccatgttgtccatttatccacgagtgatgttgttcggcacgtatgcttctctcaacagttttaaaaaagcacctctgtgcatctcagaattctgcagcaaagagagaatagatatctgcgctggtgtcttgtttagttggtcgatgactgaatacttcttagcctgtattttcctccaaagatcatctaaacctatttaaatgaggagaggttggttggcagcttgcttgcttgactcggccagatgttcaggggtatagactgtaccagttctcgtcataccctgtgctgcgatggcttcctcagacctgtttttacctttccttcttgcctcgggtgtataatcccaagggatagcatttgaatagaaaggtggtgtggtttacattgccaccgaaataggcgtggccatccttacttcaactggaatgtatgttaggggtggcaggactgcaacctcgagtggtgttggagcgtttactggagatacaaactcaacttcaattggcgttggtgccttcgcctttgcaggcagtgctacttcaaactcaagtgggatagacatattcacctcggcattctcaaatggctgaatctggactatgatcgggttgagagtgactgcaggtttctttgggtcatcgccttctacgatcaacccgattgacccctcgggatcccaatcatcatctatctcaatcatatggatacctccacccttatggtgttatgaagggttgttgcggacattcggaacaactcttttgccataataatcttgttatcaatgagggtctgtatcttatctttcagagagcgacattcttcgatggtgtgtcctttcatgccagaatgatatgctattgctcccaaacgcacacgcaagtatacgtggtcatacaagtaatataatgataaattggattgtcgaacccacagagatttgtataaactactcactacttcactataattgttattcaaccaagccaaaataagatccaatagtgtaattatgataaactacaattctaggaattaactaattatcaagtaacaaaaatgttgatatgtattcagtagagacaaatattccagggttgtgattgtttcaccattcgtattgtattttaattaattctccctttcatataattcactcatggttgctaattaatggatagttgttctcatagccttctcccgaagcactactcgcctattatcaatatattaacgcctatattcctatgaaattagtctatcagaatgcattaagattacgatatctaattaagcacggtgactaggtatattcctatccttagccacaaatccgctccccttgagggttaagatcgcgctctcttcaactcttctctaatctacacactgctttcctaagcatagcatagatagtatatagaacctaactactagccaaacaattaagcaattaaacacataattaaataaacaaccatatattgagagaattgtaatcaaggtcaaattaatgtcgaaacacaatattcatggctaatcacaaccccagaacaatgggtgtttagccactcatgctcaaatatgacaaaaacccaatagaaatcacactactcaaagcaagagatgaaaaaaagaagatttgaaggtctaattgttccaatttcttcccacaatgaagtgttctctcaatttgctgctcaaaaactagtctcccccctcttgggcggaattctactacttatatagggtttggggcaataaaatcctgtctttgcagttttagtccctgaatttccagtgattcgccgcggtcacggcatgaccgcggtcggttaatttttctggtttcagatccttccaccgcggtcgcaccgtggtcgcactgcagtcaaccgcggtcgcggtggcctgccttcagttctcttctcgcttaactttctgtgcattcatgaatatcattgtgattggcctcaaatctccacagttgactccaattttctccaatatcctctcctcgtgacatgtaacatgcaaagcacaaaagacactaatcagagcatttctttatcaatatttacattaaaacaacacaaagtgttgttcgttaggggcataattatagttaagttcacctatcatcaaaatcccacacttaaacctttgctcgtcctcgagcagctaaaccacactctaaggcctaatcctctcaagaactacctctttttgtgccatacctagcattttacaggaacaccccaagttgtgcaacaaccacacctcaaaaaagactctacatgccatgccacacttttgctttctcaaggtactctttacagaggtgaaaacttgccttttcttcctgaattacatgccctcacatcacacaattgagagaagttccacaatgataaaattcgaaataacaggaactttagatgaaaagaattcactcactttcaacaaagaacattcacatgtcaaacagatacgccataagcttgcccgtagagtaatactctactaatcaagttcattcagtctaagatcaataggtctttatttggttgtaatgtaggctaagggacaggtaggatacatttaagtatagtgactaacctccctaagcacttttaatacatttacttccactttaagcccaattttcttgctcagccacttgttttccacattttgtttcataaccaccccacttttctcagctgcaactacctttttcgtgccactaaatatcaaggactaaagtgtgttcattgtcctttttatttcttttttttctaagtggcttcacttcttttatattattgcaactttcattctatttccatgatttctctccccgaccacaccaccaccccacacttagccttttatatattttctaacaattcaagtgcccatagggggtacagggttcaaacaattgagctattcaaacacatggatttgggtcgttacatgtttatcaaagaaacatgctttaagctcaacggggttaactatggtacattatttacaggtggatatatatatttatgtaggcttcacaaagaagtgcctatgtcctttctaagaccaaacaaacttctatttcgcttcgtacacacacaggtcaagttctaggtatcatatgcagacatagaataaaacgtaatcacttacacacacatggcacgtaatccatcccgaatcggttcatcaacacactcaagtgcgtattcaagttaggcacagtgtgcaaatttaaggcataatacaagagttaaaaagtgagcctaagcgtcgcacccttgggtttgtttagattgttttcaggtgtgtacactgcggggtgcattcttgcctttacctttttagcccaagagggtcctaataactactacaaagaaatctacctaacccggttcaagctaaacccttggaaaagaaccgtggtctaaagaaaaacaaagggggaattgctacactacttaaagagaaaataaaaaatctttttggtcttttctttagactacttccctcaagaagactgtctaagtggtccgtcatcaggaagagtctcctacaattttttttagtttttagttttttttttagatttcgacttatgccctcaagagacccgttgaaaggtgtccatcttcgggccaagacaatgcaacaaaacacaactaaaatagtatctacacaaatcaattaacctatacaactatacaacaacaagaaaaaagtctcccaccccacacataagaatatggcatgccctcatgacaaatgacaataaagtacaagggggtaaggaaacttctctggagctcagtcggagtcagaaatggaggttgggtccacattgcaggcctttccaatggcgcggaaccacgcaatgaatctgctctccgaattagcctgccgcgtggacatcgcatccaaccagacgtgaaggctatctacagaggtgcgcaaaagagccacatcctcctccaaggtggtcattctggcgccagactgggacctagagggtctttcctcatcatgggacctccgtggtggtgcagtagagggtgggaccacctcatcatcatcaagttctataggtgcaacaacgtcctttcccacatttatctttgcagctctgaaggcagccttcttcgacaatttcttgtcaccggggtgttcgggcgcatccgccaatctacacaacctcgtgaccaaggagggaaagtagaaccctttggtcagtaatggggacctgatcatcatttcatccccaatcacctgggcgacatcaaagtccatcccattgacgaagcaccacaccatcacatcccgcgatccattcacatcagcagtattgctggaggccaagaaacagctacaaatcacggtgaaccagcacttggcctcccaggttaaagaattagaattgagagttttgttttccttcacccaggaaggcggcctacccagacagatagattcaatcagcatgtttcaattgaccgctggagattggtaggcccggtagtaatcgacttcaccggtgaactgcggtatcctatagacccgacgaattgcctccacggaggcatccaccacttttcccctaaccgtgagtgatcggagcatatgttccgggcagttcgcatagaactcccggaccatcattatgttcgcagtctccggctcctcaaataagaagtccaaccctcgccttcggatctcctcatacatggtagggttttaaattgcagggctgcccggtctattggcacttccacgacacaattcttagcagccttagcattgaaccggtcttctgcctcttgggattcaaaacgggttgcgtctcaggttggtgctgatgtgctggtagtgtttctttgcttacggggggccatgatacctgcaaccaaagagggacaactgttagggttgtcctagcaatgtgccattcgggtgattactcagacttcaccacccgccggtcactaaccaaatcaaactcgccaaaagtggccaatgtacaacattaggtgggacacattgtcaacacatacatacaagccccattgttactacaatctcctcaacttcaaacatactgacccacttaggcccccaacaacagtaatgtcccccaattaacaatacaaactacccacataggcccccaaaatagagtaaactttgacattcttcaacacccatggttcatggaccacccttcccacacttgatagtaccattgttaagcataccccacacttcacaacttaaccccaaagtttccacacccaccatataacaagtcaaaactcggtggggaacaaccattatccaacaatattcaagatcttactacaaaaaaaaactaattaaaaagcaaaaattacaaaaaaagaaaaagagaataagaaaaacttacttgaagaggttaacaatggtggagtgagaggaaggagtaagagagggtctgctgttgggtggggggggggaggaagaagaaaaatgttttaggtgaagaggaagaagaagaagggggaatttatgggggttttgggttgaaggagttgaagagagaaagaggaagtgggttgttgggtggggagaagaagaaggagtggggttttgggttataggggtcggttgagtaggggaggggttcttaaattaaaaacaaagtaaaaaggaaaagaaaaatttaaaaaaaataaaaacctaggcgtgactaatatcaccgcggttgcgccgcggtccgctgcggtccgccgcggttgcaccgcggttcagagggggcatttcactgtggtcgcgccgcgattcagagagctgtttctatcgcggttgcgccgcggtgacgatcttctgaggcttttcaaattgattttgcaatttacttagttttaacctcgtttacaccttaccggaattgttctatgccccaggcttttgcgcaacaccctccacaactgtcttgcacactaaagaaaatcatgttaagaaaatactactgccatgggttgcctcccacgaagcgccgaatttaacgtcgcggcacgacgagtacaacaatcaatgggctgcctcccatgaagcgcctgatttaacgttgcggcacgacgcagagtctcgcccaactaatcagcgagcttgaccttggtcttctcatgattcattgcaccaccccaatagtgcttgactttatgtccattcaccaaaaatgttctttcaccatgtatagctcgcaactcaagcgcaccataaggagtgactcttactacttcaaacgggccagaccatctcgatttcagctttccaggaaacaacctcagcctagaattgaataataatacctcttggcctggctcgaattgtcgtgacttaatatgcttgtcatgccacctcttggtcttctctttgtaaagtttggcattttcatacgagtgcagcctgaactcatctaattcatccaactgcagcaatctttgctcccccgcggcttcaaggttcatgtttagctttttcatggcccaatatgctttatgttcgagttcaacgggcaagtgacacgccttcccatagaccaacttgtacggtgatgccccaattggcattttgtaagctgttctatacgcccataaggcatcatctagctttgcagcccaatctttcatgttcacattgaccgttttctccaatatttgctttatttctctgttggagacctcagcttgtccacttgtttgagggtgatatgcagtcgcaactcgatgacgtactccatatttagctaaaaggttattcaacaaccgattgcaaaaatgtgttccttcatcactaatcaaggcacgcggagtcctaaatctcgagaatatgttattcttcacaaacgcagcaacaaccatggcatcatctgttggcaatgcgattgcctccacccacttcgacacgtagtcaaaggccagtagaatgtatttgttacctctggatgttggtaatggacccatagtatctatcccccacacatcaaaaatctctacctccaggatattgttcaagggcatctcgtgcttcctcgtgatccttctcattctctggcactggtcacactttttgacaaatgcgtgggcgtccttgaatagagttggccaaaagaacccagattgtagcactttcgccgctattttatcgccaccatgatggcctccataaggtgaggcatgacaatcatacaacacgagttccacctctttgtcaggaatacatctcctcatcaactggtcaccacattctttgtacaagtatggctcatcccaatagtaagacttcacatcacgtaagaacctcttccttgcctcagattccatttccgggggaagtaccccactcaccagataattcacagagtcagcataccatggaggagggtcttgggttatagcaaaaagttgctcatcaggaaacacttctttgatttctccacatggtcatgattttccagccttgacagatggtccgctacttggttttcagtgccctttcggtctcgtatctccatatcaaattcctgcaacaataacacccagagcatcaatctagctttggattccttctttgtaaatagatacctgattgctgcatgatctgtgtggactatgacttttgttcccaccaagtatgcccaaaatttttcaaaggcccacaccacagctagcatcttcttttcagtggtggtgtaattctgctatgcagcatcaagggtcatactcgcatagtaaatggagtaaaacaccttgtctctcctctggccgagcactgcccccattgcatggtcacttgcatcacacataagttctaatggttcagaccaatcaggtgcaacaattatgggggcagccaccaatttcttcttaagctcctcaaatgccttcaggcgggcttcatcaaaattgaacttgacatctttttctagcaacctgcacaaaggagtagcaattttagaaaaatctttaataaagcgtctgtaaaatcctacgtgtcccaagaaactccggacacccttcactgaaattggtggaggtagtctttcaactgcctccacctttgccttatcaacttcgatgccactccttgacactctatgacccaaaacgatgcatttctgcaccataaagtggcacttctcccaatttaagaccatatttgtttcttcacaacgggccaacaccatgcccagatttttcaaacaattatcataagatgacccaaagacagagaagtcatccatgaacacctccacgaatttttccacaatatcaatgaaaataaccagcatgcatctctggaaggtggctggtgcattacaaagaccgcacggcatttgcttgaaggcgaaggtgccataaggacaagtaaatgtcgtcttctcctgatcctctgggcatatgacaatttgattttatcctgaatactcatcaagaaaacaataatattcatgcccagctaatctgtccaacatttggtcaatgaagggtagagggaagtgattcgttcaggttgccttgttgagccttcgataatcaatgcacaccctccatcccgtaacagtacaggtaggaatcagctcattcttctcattctcaatcacggtcatccctccctttttgggcacacattgaaccgggctcacctagttgctgtcagaaatagggaagatgatacctgcatccaacaattttatgacttctttcttcaccacctctttcatgatgggatttaacctccttggatgctcaacacttgggcagtgtccctcctccataaagattttatgcatataaaatgatggactaattcccttaatatctgcaatggtccaccctattgcctttttgtgctcacgaagtattctgagcaatttctcttcttgtggcttagtcaagctagacgagatgatcacgggcaatgtttcagagtttcccaaataagaataacgcaaatgtgctggaagaggtttaagttccagctttggagcttcctcaatagaaggcttaggaggggttagagtgactggcttgttcaactcctcgaatttccctagcccgtggatgtaactgcaggatactttaagagcattctcaatctctccccttgtttcatctccactatcttcttcacctcccaccaaaacttgctcaagagggtccacaggacacatgtagggaaccactgatgcatccttgctttccaccccagtaatcatggatagctcttcatactggactggtaatttgagtgatttatagacattaaacatctccactcgatcaccaacccgcattgtcatctttccttcacacacatcgatgataactttgcttgtagctaagaagggacacccaaaaataaatgggacttcctgatcaggctcataatccaggataatgaaatcagctgggaatatgaaagatcccacttgtaccagtacatcttcgatcactccctcaagatgagcaacggagcggtcaaccaattgtaaaatcactgttgttgggcgtggctcaaccaaccccaactgcctgaacactgatagtggcatcatattaatgctttccccaagatcacacaaggctcacccgaatgcatacttaccaattgagatttggatagtaaaactacccggatcctttaacttctgaggtagctttctctgaattctggagctacactcctcaatgagtgccacggtctcatacttagtcagccttcttttgtgggccacaatgtccttgatgtgtttggcatatttgggcacctcatgtagaatatctaccagtggaatgttgatttgtacctgcttcaagaggtcaaggaacttttgttaagcaacattatctttcacctttttcaacctttgagggaacggagggggtggccttgcaaccactggtgggggtttcttagccaccgcctcatcagctggcttctccgactcatttggatttgcagatgttggctcaataataactggttccttattaaaagttacctgctttctcttctcggattgcacttcttccaattgcctcccattcctcaatgatacagcattgacaaaagccttaggattggcttcagtgtcacttgggagggcccctgtttgtcgggtattttgggaactagcaagttgacccacttgacgttccaaatttctcattgctaccatctggtcttggttatctgccatcatcttctgattgaaagcaagttggtcgttcatcattcttttcataatttcctctaggatacctgattgctcagcctgaggtagcttgtaatgctgctgaggtgcatgaggtgctggaggctgtaattactctaagtgccttgatttccaccccaagagaagtttgggtggttcctccaggtgggattataattgttcccatattgattggcttgccctctattttgatttcccacatagcagacagactgtggattggctgggcatgagtcacttgggtgaccctctccacaaacatcacaaaagacttggacctgttgtactggctggacctgttgaatagttgagattgttgcttattaatgatcagggtcatctgattgacttggttagtcaatgtcgaaatctgagctgacaatgctgagacaacgtctaattcaagaacccttggtgacgtttgaaccacattccttcccatctcactttgccagtctggattgctcttgaagaatttattcaacaaagcaaatatttcatcataattattctccaatacctgacctccagctgctgcatctaccacaattgttttttggggatagagtccctcgatgaacgtgtggaccaacacctcgtttgtctgattgtgatgaggacagtctctgagtagccccttaaatctctcccatggtgaatacaaagactcgcctactttctgcttaaaggagactatctcactcctgatcttagcagtcttacctgaagggaaaaacctcgccagaaatttcctcaccaaatcattccaggatgtaatggaattgaccggttctgcttttagccatcgcttcgcttcacccaacagagagaatgggaaaagcgtaagcctcacataatctggagtaaccccgttagtgacatatgtatcactaatctctaagaagttcagaatgtgctactgtggatcctcgtgcggaagacccataaactgcccatttgcatgaagaagctggatcatgctctgctttagctcaaagtgcccagtgattctaggcttcacgatactaggtaacattagcaatactaggcattgctacctcctgaaccgccatgtgttgttcctctaccatattcacaggaaattgaacgaagttctgaatattgttcgtatccctttcttcccttaacctcctgtgaaatgtcctctcgggttcagggtcaaagccgtcaagtctatcctggcttctgacccttcgcattcaattagagttcctgagattagaacaacgatcacgtaatgttagattagatgtaataaacaattaacgtaaaaactagaaagtagtttattttcaagtccccggcaacggcgccaaaaacttgttgctcctaaaagcacacgcaagtatacgtggtcgtacaagtaatataatgataaatcgaattgtcgaacccacagagatttgtataaactactcactacttcactatagttgttattcaaccaagattaataagatccaatagtgtaattatgctaaactacaattctaggaattaactaattatcaagtaacaaaaatgttgatatgcattcaatagagacaaatattctagggtatattcctatccttagccacaaacccgctccccttgagggttaagatcgcgctctcgtcaactcttctctaaactatacacggctttcccaagcatagcatagatagtatatagaacctaactgctggccaaataattaagcaattaaacatagaattgatgaaacaaccatatattgagcgaattgtaatcaaggtcaaattaatgtcgaaacacaatattcatggctaatcataaccccagaacaatgggtgtttagccactcatgctcaaatatgacaaaaccccaatagaaatcatactacccaaagcaagagatgaaaaaaggagatttgaaggtctaattgttccaatttcttcccacaatgaagtgttctctcaatttgctgctcaaaaactagtctccccccccccctcttgggcagaattcgactacatatatagggtttggggcaataaaatcccgtttttgcacttttagtccatgaatttttagtgattcgccgtggtcgcggcaggaccgcggtcggctaatttttctggcttcagatccttccaccgcagtcacaccgcagtcgcaccgcagtcgcaccgcggtcgaccgcggtcgcggtggcctgctttcagttcccttctcacttaacgttcagtgcaattcatgaatatcattgtgattggcctcagatctccatagttgactccaatttgctccaatatcctctcctcgtgacatgtaacctgcaaagcacaaaataccctaatcagagaattttgttatcaatatttacattaatacaacacaaagtgtggttcattaggggcataattatagttaaattcacctatcatcatatgcacaggatttgtttgggttaacccattgagaagggttctcaggggtggtagcagggataggtgtgacgtaaccagcagttttgagcttttcatacagctggtcgatgggctcggcgatggcggtatattgctttagagggcggcgatcaaagttaggacgaggcttagggaagttttgacgggtagggggtgattgatagtgagatggctgggaattataggtgttgtatacgggagcgggttgtgaatatctaggtagggtaggttgatatgtgggtggtggagatttgtatgtgggcggtgaagcttggtatgtgggcggcagagcttggtaagaaggtgagggtgcttggtagttcggggtaggctgatatgtgaaaggaggtgttggatagacttggtatttgggtggggatttggctctttgtgcaaccatcacagctcccacatcttttctcttatacacaccactggactataaagccttgttagtagcttgcaaggcttcaaaatgtgtaaccataccgctcttgatatcttcttcaatccgctctcccaatttgataatgtcagagaacttgtgaccttcaaccatcatcagccgttcataatattgcgggtcctaagctcggacaaagaacttgttcatctgttcttcctctaaagcagatctaactttagcagtttccgacctctaacgagtagcatactcgcgaaaggtttctgtggatttcttctttaggttttggatgtagaacacatctggtgcgttctctgtattgaatctaaacttgtccatgaagtctatttccatgcctacccagtttgaccatttcttagggtcttggctgatgtaccaagacagtgcgtctcccttcaaactcctcatgaacagcttcatgcggatcctttcgtcttttactacgccaaccaacgtatcacagtaggtcctcagatggaccctcggatcaccagtgccatcaaacatttcaaactttggaggtttgtacccgtcgggtagttcgacatctggttgtatacagaggtcttcatagttcaaaccttcaattcccttgactccttcaacaccctgaactcggctagttagctttctaagttcctcagccagattcttgataagcaggtccttttcatcaaactcggatgtatgtgtgacaggcggggtggagtgagtcacggtttccacgtagatgggattgttgtaggcatggaagtggtcttttgtgtgatcttgaggttccgggagtggaggcagagcgttgtggtggcaagtattgcactgtgctggaggagtttggttcttcgggggagtggcgtgatgatgaagtgcagggtgatttggtcgttttgggatattctgtggaggtgtagggttgacgtcagggacgttgagggaaaatgacagattgaccagattccggacatggtcgagctcctctttaaactttagcaatttctgttctaatagtgacatattctcatgcgagacttgaataccccgatcgtcaatggcctctacctgttcacccgtattttccttccggataccactggattctgccatcttactcttgcccttgtttctacctttgggaggactaggaggaggcgtaggtggagggccctcggatcttgtgcgataggatgatgatgccagaatgcacgaactaacctttggggaaggggataataactaaaagagaaacaaaaacaaaaggtaaccgagtcagtgaggattatgaaaaatattgcagtaattaaatatgtaatgcggaaatgtgaagcgtatcctaagttggggacctctttgtgcccgaggtaggcctagcgacaaattgatttggagaacttaaaatgctacatgccttattttattgatagaaaatagacaaatcgtgaaacgactctaaatatgcggaaaaaaataaaaataaaaggcgctaatggccataggccttattacatcaaagaagaagaaaaaagaagacacccctatctacttggtcccagaaggaccttccctagattcggcattcctgcttccctcgatcagctttcccaactcgcgaagtcccagcagtaggtaggttctggctaggtatcccccttcagctccctcaaccttttggcaagtcccaatcctcttgatgaacttctcttccagctcaactatacctcgttccaagtataccagcctcttattggtgctgacggccatatccttccactcctcgatcagttttttgttggactcgtgtatcttgtgatgatcatcctcacatttgtgggtcctcttgtgcagctggttgaacttaactcgtgcttcagccttctcatctataacccggtgacctcgaatgaacctttgctcgacttgaccctctatatcttcttctaaccaacttaaatagaaaggattgcaaccggcgtgatacctgcctggctcgatagtgtctttctcaagcctaatcttgcagtgccataggtgctgagcttggcacttgtgagggctgtcatcattttgaaagtctgctcgaagatggctcattttctcgaccctaggtatgacctgcttcctacccgctagccactcacagagagacgtaagggtatgtccctcccagaccaatcagtatcagaaattggggaccgaatgatgaactcgtttgtcagaaaccactcaaacatccattgaacctgatcctcggttaagttaccaaataactcaacccatccttcggcattctccggctgagcgaacatgtcgggaatatagttcattcgcttttggtgatggaaagcgatatggtcatcccaaatccttcgatgggtatcttgtcggtattcacatttttgtagatgttccacgagccagagttggagtaataagtttcaaccttcgaaatgccttgctcctcgttgacacatttctagggcccgatacatatccgcgatgatcatgggcacaatgctgaagttctgcccgtctatcccttccattagcgtcttagctaccatggccaacctagtatggattctttccttcttaattgggaacacaatcaaacccaaaaagcacaccataaacacgaacactcggcgatggatatgccctagagaggtgatggaaaactcgtcttggtaggtgcagtacgatttgttgtgaccgtacctttcatacaaatagtcgaaaaggatatatgaatccttcagacacaccaattctggattcttcttcagacccatcattttgaggaaacccctgcccgtgaggagattcccaagctagactcctcctatctcctctaataaaggtgtcatttcaaggttcccaaagcggaacacggacctatcgcaatcccaaaacagagtagcggcctctatcatcattttgttttgcttgatatctagaagagatggtagattgcccaggttttttctgacgagagttttttcactagagtggaggtcttcccaccaattcagcagcctagggtgaatattggcgaccatgccaaatctggggacttcatgcctcaattttcaacaaagaaaaataaggttaggcccttacccccaccagactcgactatttaacaccaataattagcaggaagcatttagttctccaaataaatgcacagagcgtgagggtgtccgtttgggttttagggaaacccagtggactttggacaaggctatcttaaaggctattgtgcggacaacgcgttagcctgactaggtttgaccatgatgcatgcaactgtataacggagtaaggtttctatggggttttagactggtacccttgagtggacaactcaaggaggaaggcacgaaactgtcgactgcaccgctgatcgactagttttaccgtaaatacgcctttccaaatttaaggggtaataatataggaagagcgcaactactcattgtaagcattgctatagtattttgcttggaacgagtggagtatgaatgtcgagcatgatatgcaataaataagcattccaacaaatagtcatgtatttgcacgttaaggaaagtgataaatacaacagttatgattgaaagcagttacaaaggaaaaaaagagacatgttagttttgttcatgtgaaataaatacttgaaagaagtaaacaattaatagcatgtaacatggaagggaaggtgtgcaagcattaaacgaaattaaaggtccaaattcacgaaggatttgtaatagtataagcctggggatatccccagcaaagtcgccatgctatcgcgccccctttttccttaagcagagatcgggtttatgacattctgacaactccttttaaaggaagagggttaaataacagtcgccacctaacgattttttaaggtgcgttatggcacctagagtaattaacttatgagactagttcgcgttactagagattgggtaagtgcttgaaattatcccaaggggaaggtattaggcacccctcaggatccacaactgtggtttccggccaaatggttttcgtgaatttgtacaataagcaagtaacaataatggctcaaataaggggggatttcaaataagcattgaagttattaacttttgaaagaactaataaaacatttgagagaaagacatcctaggtttgaaacaatatggatcacatcaatgcaatacccgatagacactcctcagagaggggctacacgtggtattagcgcactggtcatcatatccatattctaccctttcccagcccgtgaaggtaattaaaacgtgtgttggtcacgaactctattgtgtgctattacccgtcccatcctatcagtcctggaggaggctaggactactattctaaaggaggtactaggctgacccctgggtttagaggacaaaattctaagcgacaagcaaagacaattaggattgtaaataaggggtaaaacaaataggagcagatatgaggcccaagtattcatccacaggttatgcacataattagcacgactcaaacacaagtaaggcctttctaacttcaggacctaaggcatgatgtctaagcaagaatgcaatgacgaggcaattttattactgattttagagaatgaattgtaccagtttctgaatagtgattttaacctgttgttagtgaaaatagtatgtataaaaggggtatactttcagctctaacaagtttaatacctaaggcttgcataggcgtaccattcactacaaaatcgctcacatttctctgttataagtttccagcttttagaaaacagttactaaataggggtgaatctttttattcataatcaggctaggggtgttaagcgaatatgaatgcgatcctaagaggcatgatatctaatgcaaacaaggtgcaagatgatgcaagacctacacatgatgttctaaatgcatgagcgtttcactgttagaacgtgttttagaaagatctatttattaacacatgttttttgacttaaagcagaacgtagcagtttcagagagaaccagttctttgttagtttgctgagcctaatacatgattttctaggtgttcgtagcagtgtatacagtgatgcaaagtatgttctaacacaggattttggcataagtgacatgaacatgttgaaaacaatatcctaagggacgtgatttctaatgcaagattgatggttgttagtgttatcatttatcctagaaaaagaaggatttctaaggtgatgcaattagggcagatcagaatgttgaagcagtaatattgtgatagcaatttttcttgttagtaatcctataaacaggatttctacgtgtaatgagatgctgaatgcagtaaagctgagcaacatgatatgtatggcatgcctgttgcacctagacatggttactattgcacacataaggaaagtaaacctaaggcatgatctctacccatacttatactacagcatgcatattcccacccgtttcactatccaaccccaaatagtcgtttacaaattattacaggccaggaatgatgaattacataaccaaaagaaaatcaagaagttatttctatagggagccttcatttaggcccagattttccaaatctcaatgcctttagtatttcatagcctttcatagtccgggcatgtcaatgttccctaaggtcctcgtgggatcccgggaaatgctcacacccagacatagtcaccaagaattaagcctgtgcagtgtggaaataccagcctcagtgtgtcaaagttcagagggaactcaagaggttcccaaagcagtgctcacattgaaggggtggaacataagagtctaggagtaaattgaagtgcaagaggagagtttgaataaaaaagggattttgaaagagacagtcttgaaagggacttagttgaaagcttttatgactaagagagttgtttgaaagtagcttttcgaaaacagcaatggaatcatataaatgacatggcaatcatagaaccctaacaaatcccaacaatactcaaagaacaaccttcaaacaaggatcatgggagctggggacacatagattacataacagacagaggtccttgcaattagtgcagatggtaatacatagtttcaagagtacttgattaaacatagttgcaaaaattagagaggcttaggggattcaggggaatcaggagacagcagatcacaggaatactgaacatgacattaaaacaacttggaacaatggcccaatagatacatactaggaatagacaacaacatatacgtattagtcttgttactgattcaatagatcatgcaaacactaaagagataagacatggctagcatgcatagtgtcacgccccaaaaccgaggggcgagatcggcgcctaaccggatgatcccggtcaagcggacctggattgcctttcctacccaacgcattaccgcatgtttataatatacaaatttataaatgaaatagcaaatggaaccaaagtatgaatttacaacataaatccattttcctcatttaaagcttcaacatttgataatcccaaaatatacaaactaagcacaacatttccaatacgggaccacgattatgaataattacaactactaatcaaaatatatacaacccacaccaacatacttgccgacaacaaggccccggctaaaccttaagagaacaaaaatataccaaagagatgactatgcacgacccagagaggaatggggctcaccagtactgctgaatggataaagagaaggcaccattatctgtggacggagctacctgctatagaaccacctacatccatatacaagatgtagtgcccccgacaaaatggacattagtaccatggaatagtactagtatgtatgaacaaacttaactctaaataaaatcaaacagcgcacaaattggaggcagtcaaagaaaccaaacaaatattgcacagagatataaagcatcacaaatgaggttttcacagtttcttatttcaattgttctcctgttgcggcgcacaacccgatcccaccgtacaatcgtattccacccttattccttctcatcattccacccttattttttctgttgcggcgtgcaacccgatcccaccatacaatcacattccacccttattacttctcaaaataccacccttatttcacctattgcggcgcgcaacccgatcccaccgtacaatcatattccatacccttattacttctcacatatcacccttattccttctgttgcagcgcgcaacccaatcccaccggacatgggattgttatgagtgtggggattcaggccatatgaggaggacttgtcccaagctttagggcaaggttgttcagtagagttatcagcctgcatactcagcatcggcgccacttccaccccggggtggaggacagactagtagaggtcggcctagaggttgaagccagataggaggggctttaccagttcctatttattccagcggaggtcagtcttccggtacaccagccaagttctatgctattccgacccaagcagatgtagtggcctccgacgccgtgatcacatgtactatttcagtatgtggtagggaggcctcagtgctatttgatccaggatccacttattcgtatgtgtcagccttatttgcttgtttcttggatgttcctcgtgagtccttgggttctcctatatatgtgtctactcctgtgggcgattctgtggtggtagaccggataattcggtcttgtgtgatcaccttatgtgggttcgagaccagagcgaaccttttattgctcgacatggtagattttgaggttattttaggcatagattggctatctccttatcatgtcatgctggattaccatgccaagacagttactttacccatgcccgagtcgtctaggatggagtggagaggttcctcagttagtgcagccagacgggttgtttcattcctgaaggctcgacatatggtcgagaagggttgtctggcctatcttgcctatgtgcgggacaccaccgccgagtctgcgatgattgattcaatgccagttgttcgagattttactgatgtatttcctatagaccttccaggcatgcctctggatcgtgatattgatttctgtattgatgtagctccagacactcagcctatttccattcccccgtatcgtatggctccgaaggagctgaatgagttgaaggagcaacttgaggatttgttggtcaaggggtttattagaccgagtgtatcattgtggggtgctccagttctatttgtgaagaaagaggattgggtctatgcggacgtgtattgattaccgccagttgaacaaggttactattaagaacaagtatcatttgtcgcacatcgatgattttgtttgacaagttgcagggtgctagggtgttttctaagattgatttgagatcggggtatcaccagctgaagattcgggcctcagatgtttcaaagactgcttttcgtacgaggtatggacactatgagttcctagtgatgtcttttggcttgactaatgccccagcagcattcatggacttgatgaacagggtgttcagaccgtatattgattccttcatcatcgcctttattgatgacatcttgatttactcacatagcctgggtgagcacgagcaacatttgagagttgtgctccagaccttgcgggaacagaagctatatgctaagttctccaagtgtgtgttttggttggataccgtggcattcttgggacatgtggtatccgaaaagggtatcaaggttgatccccaaaagattgaggcagttcagagttgactgcgtcctactccagctaagagatcaggagcttcttgggcctagcaggctattatcgccgatttgtggatgggttctcttctattgcagctccattgactagatttacttagaagaatgccccattccgatggtctgacgagtgtgaggcgagctttcagaagctcaagtcagcattgacttcaacaccagttctagtattgccttccgattcagtgatgtatacagtgttttgcgatgcttcacgcgttggtttagggtgcgtgttgatgcaagaagtgagagttattgcttatgcttcgtgcaagctgaaggttcatgagaagaattaccatgtgcaagatttagagttggcagcgattgttcttgcccttaagatttggaggcactacttgtatggagtttcctgttaggtttatacagaccaccgcagcttacaacacttattcaaatagagggagctgaatttgaggcagcgcaagtggcttgagttgctgaaggattatgacatcaccattctttatcatctcggcaaggcaaatatggtagcagacgccttaagcaggaaggcagagagtatgggtagcttgacctatattgcagcagaggagagacctctagccttggacattcagtccttggctaatcgcctagtgagattagacctttcagagcctcgtcgaggtttagcacatgtggttgttcagtcttcgttattgggggagattaaggctcgacagtttgatgatccgtgtctggcagagcttcgggagacagtgatttagggtggttccaaggaggttgctattggcgaggatggtgttctgagacttcagggccgtttatgtattcctaatgtggatggcctaagggagaggattctggaggaggctcacagttcacggtattctgttcatcctagtgctacgaagatgtatcgtgatttgaagcagcatttttggttgaggcggatgaagaaggatatagtcaagtatgtggctaggtgtcttaatttccagtaggtgaagtatgagcaccagaggccaggaggcctacttcagtagatgcccattcctgagtggaagtgggagcgcatcactatggacttcatggttgggttgcctcggacgttgcggaaggttgacgcggtttgggttattgtggatagattgaccaaatcgacgcatttcattcctgtagctaatacttatacttctgaaaaggctagcccaaatccacatttgggagatggtccggttacacagtgtgccggtttccattatatcagatcgaggtcctcagttcacgttgcacttctagagatcattgcatagtgagatgggtacccagatagatctcagcacaacattccaccctcagattgattgtcagtcgaagcgcacagttcaaatgttggaagacattctcagggcatgtgtgattgactttggaggtcagtgggaccagttcttgcctttggccgagtttgcttacaataatagttaccagtccaacatcgagatagctcaatttgaggctttgtatggtcggcgatgttgttctcctatcgggtggtttgagcctggcgaggctaagttatatggcaccgacctggtgaaggatgctttggagaaagtgaagttgattcaagagaggctccgcacagcacagtcccgacagaagagttacgcaaatcagagggcacgtgatgtgtcatttatggagggagacaaggttttattgaaggtctcgccgatgaagggtattaagctgagcccacagtttataggccctttcgaggtgttgaggcgagttggagaagttgcttatgagcttgctttacctcccagtttatcaggagttcatccagtttttcacgtgtccatgctccggaggtaccacgcagacttctctcacgtggttgatttcagcactattcagttggatgagaagttgggctacgaggaggagccagttgctatcattaataggcaggatcgcgagatgagatccaagagagtttctaccgtaaaagtccagtggaggggccaaccagtcaaggaagcaacttgggagtctgatgaggacatgcggagcagatatccacacttattcatcacatcaggtatgattctagactcgttcgaggacgaacgtttgtttaagaggtggagaaagtaacgacccgaccagtcgttttgcgtattcagcccctgttccccttaatgaaacttcccatagcggcttatttttgttcatgacttgcggggatgggtggttcgagattcggaagtgttttgagtggtatagaaacacttagttccttaaggttggccttttttgccaagtttgacttcggtcaacattttgagtaaacaacctcagaatcgagtttcgaccattccggtagcttcgtatgatgatttcggacttgggcgtatgttcggaatgggttttggatgactcgggagcgtttcgatgcccaatatcgaaataagaatttccttaagtttgaaatttggtttggattctaggggttttgaggtgtgattttgagttttagcgttgtttttcgtgtttcggaggctcgagcgagtccgtattgtgatttgggacttgttggtatatttgcacgggggctcgggtgggcccagtgcctctcggacaccaaacgaggccaaaaaccagctgaaaaagatgctggtgcacttgttctggttgaccgcaggtgcggttgcccagtcgcaggtgcgacccccagcgggcagcccatttctcgcaggtgcggacaaagttccgcatgagcggagctgcaggtgcgggcccaggcctcctcgtccatttctgcaggtgcgagaccgcaggtgcagtcttgagccgcaggtacgcaaccagtgttcggcagtgtgtttctttaaaacacgggaaatgtccatttttcctcatttcttccaccatttgagaccttcaaagcttggaaaaactgctccacaacctagcagtataaggtaagtaaatgatatcctagtgttagtttaatacatgaattactagttaaattgaccttcttaattagtgaaaatcaaggaaatgggtcgtaacccagggctttcgagaaatttgaggatttcccgtgaatgagctatgaaaatcaagtaaaaatcatatattaatgatccttaggctatgggtgagtgttttcttcgagaatttttggaatccgagtatgcgggcccgggtggtgaattttgtgatcccttcaagaatgatgaatttactaaataagtaggataatttccacactttgagcgtgaattgatatatttgcataacatttggctagtttaaagtcctcgagtgtagagttcggactttcgggcgcgttcttggtccgagaagtagattcgacacgaggtgagtgtcacgaccaaaaatccataaggtcgtgatggcgccgtacaccacttcaggcaagccaatcactaattagttgaaataaattccttttttaacattttcgaaatcgttacctttcactttaatacatgataactagataaaaatccattaagtaaaagcaacagtctatttttccaatttaataaaaatacaacccaattaaatcccataacccggtgtcacaagtacatgagcaatttctaagactttttacaaaatgctacaaagcttgtccgaaacacaagttggacaaggactttagaataaaataaatacaatacatagaggaagactctgtcggctgcggatcgcctccggatgatgcagctcacctaagtcaccaaaccaacttcatcgctatgaaagtacatgtgcaacaaaatgcacagcaagtgtagcatgagtacgaaaacaacgtgtactcagtaagtatcccgcctaaccacagagaggtagtgacgagaggtcgacttgactctcactagggtccaacaatgtaatttaacaatatatgacagcagcaaaaggcacacgagggtaataaaatcagtaaactttaaaagtaactgcaattcaataaacactggaagtaaatacataatttcaacttcattttcccccaaatatctgtcaagtcattatccatgaaatcatttaacaatttacatccttaagacaatttaacaattcaagtcacaagtggtatatcatatgtatatatatgcgtaggaaatgccgagggtcgttcggctcgaaccaacaataaaagtaaactgtgcattgtcgagggtcgaacggcccaaaccataagagcatctttcaatccgccgtggcgtatgacccgctcccatgagagtgggggaaataacactccgctcgcggaatgtaaattgcgaagcggtcacatgcacatacaacattttcttaaattactttcaataaacaattcctttaaattaccaatttttgtgatctgagggaaaaccaaagtttcataaatcataaattcataaagcatataatccatttctagaaagaacgcaaggcatgatgtgggtcctagactacccgaacatggcataacagtagctacgcacggactcccgtcacctcgtgcgtatgtgggcaaacaatagcatatattcatttagttcacctatggggacaattccccctcacaaagttagaaaggagactcacctcgtgtcgaacctactttccgggccaagaatgcgcccgaaactccgaactcgttttccaaggactcgaaactagccacaagttacttaattatatcaataaatgctaaatgaatcaattataatgcttggaagtgagttttctaaagtctttccccaaaagtcaaaaattgaagccgggcccgctcggtccaaacccgaaatttggaccaacacccgattacccatccacccccgagcccggatatataaattattttgaaatccgacctcaatttgaggtctatccccaaatttcaatattcttaggttttacccaaaattcccaattccaccatgaaaacccgagattctaggatgaaatcttgtaaaaagaagttaaggagtgaagaaaatgagttagaaatcacttgcaaatgttttggagaagaaagagtgtttggaaaatcgcctcttatatttttggggtcttgaaaaatgaataactgaaaatccacttatttatactcctctcaggcacccccccccccccacaccgcggtccgcataaaaaggaccgcggctgcgctagcaaaaatcaagaaaaattgaagaaaatcaagaaacatgactgcagtgacatgctttagtagtttggccataaccttctctacgaatgtccaaatcacgatttctttactatcctagacactagacacaaagggctacaactttcgtgtttgcctcattgcaaaattccctgtagatcaaaagctataagcctctgaagtcggaccagtggcctagctcctccaccgcggaccacgaaaacacgaccacgaccacgaccacgaaacctccaccgcggcctgcacaaaaaggaccgcggaccgacgactcaaagctggctaaagcctgcacatccaattctaagggtctctctgttgctggaagatatgccaaactcctcaaactctccgcccgacgactcaaggcgtcggctaccacattggccttccccgggtggtacaatatagtgatgtcataatctttaagtagctccaaccacctccgctgatgcaaattaagatccttttgcttgaacatgtgttgcgaattccggtgatcagtgtagatctcacaaggaccaccgtacaaatagtggcactggatcttcgaggcgtgaacaatagctgctaactcaagatcatggacatgataattcttatgcaccttcaaatgtatggacgcgtaggcaatcaccctaccatcctgcaacaccgctccaagtccgatcctcgaggcaccacaatagaaagtgtatgaccccgaacctgtaggcaatactaatactagggctatagtcaaagctgtcttgagcttctgaaatctctcttcacactcctctgtcggagcacccttctggttctgcctggtcatatgtgttgcaatagatgaaaacccctctacaaagcgacggtaatatcctgccaaaccaaggaattttcggttctccgtagctgatgatggtctaggccaactctgcaccgcctctaccttctttggatctaccttgatcccatcactagatactacgtgacccaagaatgccactaaatcaagccagaattcacacttagaaaattttgcataaaacctcttcttcctcaaagtctaaagcacattcctcaagtgctactcatgatcttcctgagaccgggaatacaccagaatgtcgtcaataaacacaattatgaaggattcaagataaagccggaacacactgcgcatcaaatgcataaaggcttctggggcattggtcatcccaaaagacatgacaagaaactcataatgaccatatctggtcctgaaggcagtcttcaggatatccggctcccgaatcttcaattgatgatagccagaatgcaagtctatcttggaaaacaccctagcactctgtacctgatcagataaatcatcaatgcgaggtaatggatgttagactaatgatgcaaatgatatatatatatatatatcatttgcatcatatatatatatatatatgttgtgtgtaggtacctcttgagaataaaagaacaagatcactggaggatccaaactcgaggatattgcggaagaataaatgaagcagaccaaatctagtacgatccttttggtatcctaaactaaggaaacaaataaaggctgatggagaaaattgcggaaagaataaatgaatcaagtaatcaacgataccaagaatatctcacgcggctagatctggaaagcccaatatcataggaggatctcaacgccatctaaggaagcattcagcgtatcccgttatgctctagccgtagcggaacatccttattcttggaaagaatcaatctctttccaatgatcaaatctcttgggttggcagcgtctcttcagcagtcagatcttactcatatatatacactctcttgtacattatgaagacatactttgatcgaaccaattaccctctctttgttctactacatacaaacattgtagctcccaaaagatctcttgtgtaaaaagttagagaagaaagagagaaaaccaatggtgaggcattgtatcaaaaagaaatcgagaatcactgaaagatagccataggtgtaaaccacaccatctctgtatttctcgaagaacttcattcactaaaagagaacacccttgcaacccaaggggactggactaggattcacattgaatccgaaccagtataaaattccggtgtctttaattcttgccatttctagtcaactaaatacataaccagtcaactagtaaaataaataaaaatagtcaattcacccccccccccccccctcctcttacactttcaattggtattagagcctcgctcaaattttacttttgcttaatagcttgtgagaaaagatcatggtcaatcaagtcattgttggagcacttttccaggaaggaacatcccaagtgaggccaccctacttcaacggtcaacacttctctcactggaaagtgcgcatggaaatctatgcaaagtcctatgatgtcaaagtatggagagtcatccaaaagggaaactacccactaccagttactactacagctcaacccctcactgatcttgaggatattgatgcatacactgaagaacaaatggccattgtgcaagttaatgcaaaagcaagaaatttgctttacaatgctatcactggtgaagaatatgagaagatatccagctgtgatacagccaaggagatgtaatgacccggtctgtcgttacgcgaaacctacattataactgttgttagtggcttattatatgttggttattctattattaatgtgttagagttgataggcttgaaatcgaaatggttaaatgagaatttagtcacttagtccttaagaacaaccttaaaatgggaaaagtcaactaagagttgacttattggtaaatgacctcggaatgtgtattttatggtttggatagcttcgttaggtgatttgggacttagaagtgtgttcaaaatatttttaggatgcccgatgtagaattaggcttgaattggcgaagttagtattttggtgaattccggttgataggcgagattttgatctgagggtcggaatgggattccgagagtttctgtagcttctttaggtcactttggacttgcccgcaaaatttcaggtcattcggagatgatttggtttctgatcaaatgcgagtttcggaagtttttggaaatcataggcttgaattggatgagaatttggagttttgatgttagttttggtgttttgagagtgcaactaagtttgaatgatgttatgggatatgttggtaagtttggttggggtcccgaggggctcgggattgatttcggatggttaacggactcgttttagccttgaaaacattgcaggtttctggtttttgtgcagcaggtttttcttctctgcaatcgcgtagggagagtcgcgatcacgtagttcaatcgtgaggggaagcatttttgttctctgcgatcgcataaaggcgtccgcgatcgcagaggtcgggcaggtcgggcattgcgatcgcgtgaggggattcgcgatcgcgtagggataaggcaggcgcgtgggggcgaggttgaatagtcttcgcggtcgcgtgaagggggctgcgatcgcgtggggtttggaaattgtgctccgcgatcgcgacaggaagtccgcgatcgcggtgaagaaatcactgggcagtattaaatatttcatccgcgacctaaacccttatttcaccattggtgtacggacaaggagcttcttggacgaattttggaggagaaaatcattgggtatcacaaaggtaagtattttgatcattaaaactcgtttatgggtgattatagaccataatcctagcctttaattcatgaaaaacagtagaaaaattgggttttagggcttgagattttgagaccttcaagggtcgatttgaggggtcaaacggactgcgattttggtgttctttatatgtacagactcgtgggaagacgaagaacacttttatataaaaaaatttgagttttgggacgcagtcccgggggtcggattttgaccgaattcggatttttgagtaaatttgatacctttcgattggaaaattttccttaagcccatattgatgataaaaatctgaacttggtagatttggagcgttcggaagttgatttgaaaggcaaaagcattgcagagtagtttcgggctagttttgaggtaagtaatgtctttaaatcccgtcctgagcgtatgaaaccccggactatgcaccctttcacgggttttgaaataaaaaggtggaaactttggaacatggttcctaatttgggagactattgagttgcgaaaccgattttaagcctttgcttaaatagtatttatacattatgatatgttttgggctgtaagccatgttttgggcctagtgccgacttgtttactccttaggggatgttttcactattttcctcactgctatgttatgatttttcactcagtcttttctatgtaattgttttgacactcagagtattttgatactacttctttaaaatgaaatactgtttttgggtcgagaacccggtatatttatggcctgaagggcaaattgagagtgtctgactgagtgaggctgctggcctatattgtgaggatgagatgatatgagtgaggctgcggacctatattgtgtgtgaattatgccatgttgtggcttattattgcgcttgggctgtaggagccccttcggagtctgtaacacacccccagtgagcgccggtaccgaatgagtgatgcccgcggggcttatgaagagtgattgtgaggatgcctgatgggcagagtgattgtgaggatgcctgatgggcagagtgaatgtgaggatgcctgatgggcagagtgactgtgaggatgcctgatgggcagagtgattgtgaggatgcctgatgggcaatggttacgataaatgattttggcctgaggggcaattttatgaagatttttactgagttttcaaactatgatttacttcgttttcacactggttttactgagaattttactgagatatactgatattgcacttatttcgaaggtttttctgaaaactgatttcgaactcattatttgatgaatgtcacgtggtgacttggtgttttactggtttgtggaattgtgtacatgttctgtgtgtttatattactcagactgtgatttattttcattactactgagttggcgtactcataaagactccctgtgcctctgtgcacagatccatgtactagttcgcagcagtagctggcgcagtgtggtagcagcattttcacgggatttcgaggtagctgtccagcgtccacagcttctccatttcccttccttatttagtttagcatttgattcagagacatatgttatagttttagtagagttagatttatttattcttagatgctcgtgactattgactccagttcttgggaggttgtttaggttaatatgggaacgctaatacttaattatattaattatgatgtggttgtttgcttattaattaattgtgagctattataattgaacaaaagcgcagtaaggtgatggttggctagcctagttccacgataggcgccatcacgacccgttaggatttggggtcgtgacaagttggtatcagagctctaggttgcataggactcaaaggtcatgagaaggtttagtagagtcttgcggatcggtacggagacgtctgtacttatcttcgagaggctgcagaacttttaggaaacatctctattttcttgaactctttcgtgccaatttattgattctcgcaatctaaacttacgttgtttcattttctcacagatggtgaggacacgcaataccgatcagggtaacaaggcaccagccagacccacaaggggtcgaggctgaggtagaggtaggggactagctcaagcagcagccggggggtaccacaggatccccctatcgtccaagattaggttcccgccgatggcgctccagcaggacaggctcaggcaccggcagtgcttattgttattccgggtcttcaggagaccttgactcagattttgacggcgtgttccagtttggctcaggcagttgctatgtctaatacggccactgcagctcaggctgggggaggcaatcagactccagctgcccggacacctgagcaggttgtatggggtattcaggcaccaggagcagccccagttcagccggttgctcccgctcaggattttgtggtcgctgctatgcctgaggatgagcagcgtaggttggaaaggttcagcagacttaagcctccgactttcagcggtacagagggtgaggatgcccaaggttttcttgataaatgctagaggatactacgtactgcgggtattttggagaccattggagtctcgtttgttacatttcagtttgcgggtgctgcttttacttggtgggaatcatttgagaggcgtaggccggttgattcagcacctctcacctggcagcagttctccacgatctttttggagaaatacgttcctcagtcccacagagaggagcagcgtaggcagtttgagcagctgcgccagggagaattatcagtcacccagtacagatgagattttctgagttagccagacatgcgtctgagattgtccctactgacagggagaggatcaggaggtttgtagatggtctctcgtatcagcttcggattttgatgaccagagagagggtgtctggagttacatttgagcaggttgttgatattgctcgggatattgagtcggttcgtaggcaggatcgtgaggaaagagaggtcaagaggcctcggggatcaggaaatttcagtggtgccccttccagagggcagtttcagcctaacagaggtcgttcatttagacctccacagtcagttcgcccagcatacaatggggtatcgtcggggcagggtcctcgcaatgctcatcagggacattcatcttttagtgcccttccagctcagagctccgcccgagtgtcgtcttatcagggttcgtctggtggttatcagggtggcagaggttgccgtcagttttcatctccgactccaggtaattgttatgagtgtggagagttcgtacatgagtggaggcagtgtccccgtcgtcctaatagtttagctcagcagagggttcagccctcggcttcagccccagttacttcaccacctacccaggccgctaggggtggtggtcaggcagctagaggccgtcctagagggggaggtcgaacaggtggaggccagccacgtatttatgcacttccgtctaggcctgatgccatggcgttagatgcagtgattataggtactatttcagtttgtcacagtgatgcctgagtaagtggggaggcagctggggatggaagaatggtcggaggacccggtggagcacgtggtggctgagaagactgtggaggtgcacccctcctaagtctgtggcaatccctaaccatatgaagagtatcaccacactcaaaacaacccctcggaggatgcagcgactgatactggctcgaacctagcctgttggactggccactaatagcaccccgagcaagacggacattggatactggtagtgcataataaggctcctgaggcctggaaggaactggaacccacttgcggctggaagagctgaatgaatacagagactcccaaaacccctaccatggtgtgctgctggcgcacgagcccctgaataatgaccagtctctcgagacctcttggcctctctctcctttctgtcctgggcaagcattccctctactctcctagcaatgctcacgacctgctgataagagatgaccatctctaactccctagccatactggtcctaatagtggggtggagtccctcaatgaagcgacgaaccctctctctgactgtagaaaccaaagtcggtgcatgtcgagccaactcatcgagacggactgcatactccgacacagtcatagaaccctggcgcatctgctcaaactttgcgcgccaaacattcctgaggctctgagggacataatcacgcaaaaccatatttgagaactgagtccaagtgagtgaggttgcctcatccagacaactcagctaataggcacgccaccactggtatgtctctcccctaagctggaaagcggtgaaagaaaccccactcgtctccgctatgcccatagtacgtagaatgcgatgacactcatcaagaaaaccttgagcatcctcttaagctaatccattgaaagtgggtgggcggtactccttgtacctctcaagtctgagctactctgcttcaaaagcagctacctaggcctcatactgaaccggagccactagagcataggaataaactctggggcctgatcaacctggaccctctgcttaggagtacgggttgcgggagtttgtgcccctcccccggcctgagtagcaataagaacctcttgtgccggccctccaactggagctttcgagggctcctctggttgcactgcgtggtcgtcctctaccgcgaccccggcctctggcggctctggtagggggcacgggtgcctaattgtcagatctcccatcacgggtcctcaccatctatgagaaagaatagaatagaaaattttagaattttttatgtcaataactcgcacgacaaggaaatcaaagaagtatgattgttcttatctgcaatatagcctccgaaagataagtacaaatgtttgtgtaccgatccgtgagactctaataaattggcttgtgactcacgatacctatgatcctagagctctgatacaaacttgtcacgacccattttccccctccgaaagacgtcgtgacggtaactagtcgctatgactaggtaagcctattaacattgaaataatagaaataaagaaaaaatgaaggaactactaagctttgataatgactatataatggtaaaatgccgctcagcatatacaagtaaaatcagtacgcaaatttatacacaatacttcccaaaacccggaatcacgagtcacaagctctacgaaaactatctaacggtccactatacatagagtctaagaaataaaagagggaaacattgtaaaagatagagggggacttcgaggatctgcagacacgtgcagatataccttgaagtcttcggtggctgctgtggcttcactaataccaaggcagacgagaggtatttggatcagcacacgaaaacatgtacaggaagaacctcggtcgagtagttacgaggtcaggtcaggccctactggtataaatataatgtaataagacagaaaaaaatacagtaaaataaatacgaaaatctaacaagttagaatccaatgaaagtcaacagatgcgaacacagtaataacaacaggggatctcccgggataccgtcccgtagtcctaaacataaatgtgccccatctccctgaatatcgttctgtggtcccaaaataaatatgcagtgctgggggatctcaaagaatatcgttttgtagtccaaagtaaatatgcagtataaggggatctcccggaataccgttctgtagtcccaaagtaaatatgcagctcaactgatgttaataatagttacagcatggaaatctatagcttagactaagttcatgtctaataaatcaggaaatttactaaacatgctgcacaaagtccaaataggtagttaaaacacgtagacatgcttttcaaatctaaacatagtagttacataagctagtgtatttcgaacaaggaaaaacaggttatgatttagtgaaaatggagttttaaaacaaatagcccgtgtacgtactcgtcacatcacgtagatgacgctcatatatcaaacagtaccaaatcctaaggggagttcccccacacaaggttaggcaagccacttacctcaaaccaagctcaaatcaacccgaaatcacgctcttgccacgagtatccaacttcgagtggctcaaatgtaatcaaatcaattacataacgtaaatatagctacaagtaactaatctagctgatgaaatcaaaactacgacaagaaaatggaaaaacgcccaaaaagcctcccaggctcacgtctcggaaccgagtagaagttaccaaataagaacatccattcactcacgagttcactcataccaaagttatccaaattacctatattaaaaatttattttgtattttagttattttttcccaaaaataagacttcaatttcgtgatattatccataatttgagcattctaatcatagttttaataactttctaatttcaaattcaattagcctttccctttcatttctaatagtaaacttttaataatagtcttattacgttttatgtggatttcaattaacttataactttttgtaatatcagtataaactactacttattctttaatataatatagataaatatataattttcagatcataaaacaaatatatatatttttaaacagtattgctcgaaatttttaaaatttataaattttaattgtcacgacccaaactgctaactcaggtcgtgatggcgcccaacaccggagtcaggcaagccaacacttgtttattagcggtgttaccctatttcataagatgttcgaatgctagccgagtttttaagttataaatcgttaaatgaaaacgggtaagcgaggcaacttaaatcaatgtaatccaaaatcatgagccaacatttacagtttagccaaaattaccataaagtctactatatgttccagaacctagtgtcacaagtctacaggtgactagtagaatatacaagactagacaaaatgaatgtaccactgtctgaagagaatagacagaagtattgtttaatataatataatttttaatttatttatttttaattaatttaatatataaatatcctcatactatctctattttttaatacattctctttcctactataaattttaattagtttttacattaatattttacctataattaaaataatatcatattttattttaaattgcaaaattgaattaggctaatgtattgagttctcttataattattttttatttagatgcaataaaatttcttttgttttgtagctttaagatataaatttaatttttaattttcattaataaaattacctatatcagaaagttattttatattcttacaattttattttaataatagaaaaataatttttaaattgtttgaacatattatatgtatgtagtaatatgtttactgccattttatttttttacgaaatatttttttaaaataattatgacatataaaaaatctcatctcaaattcaaataattcttatcattctatcttctaaattggaacgcagtttcaaaaaattatgctatgctttcaaaattaaattaactacgctcaattcagatattaatcatagaaaaatattttcttagttatttgaacatattatatctaaatgttgtagtaatattttcattgtaattttatttcttatgtaaatattatttctttttttagctttaataaaagtttaagttttaattctcattagtaaaattacctatattaaaaatttattttgtattttagttattttttcccataaataagacttcaatttcgtgatattatccctaatttgagcattctaatcatagttttaataactttctaattttaaattcaattagcctttccctttcatttctaatagtaaacttttaataacatatagtcttattacgttttatgtggatttcaattaacttataactttttttaatatcagtataaactactacttattatttaatataatatagataaatatataattttcagatcataaaacaaatatatatatttttaaacagtattgctcgaaatttttaaaatttataaattttaattgtcacgacccaaactgctaactcaggtcgtgatggcgcccaacaccagagtcaggcaagccaacacttgtttattagcggtgttaccctatttcataagatgttcgaatgctagccgagttttaaagttataaatcgttaaatgaaaacgggtaagcgaggcaacttaaatcaatgtaatccaaaatcatgagccaacatttacagtttagccaaaattaccataaagtctactatatgttccagaacctagtgtcacaagtctacatgcgactagtagaatatacaagactagacaaaatgaatgtactactgtctgaagagaatagacagaagtattgtttaatataatataatttttaattaatttatttttaattaatttaatatataaatatcctcatactatctctattttttaatacattctcttccctactataaattttaattagtttttacattaatattttacctataattaaaataatatcatattttattttaaattgcaaaattgaattaggctaatgtattgagttctcttataattattttttatttagatgcaataaaatttcttttgttttgtagctttaagatataaatttaatttttaattttcattaataaaattacctatatcagaaagttattttatattcttacaattttattttaataatagaaaaataatttttaaattgtttgaacatattatatgtatgtagtaatatgtttactgccattttatttttttacgaaatatttttttaaaataattatgacatataaaaaatctcatctcaaattcaaataattcttatcattctatcttctaaattggaacgcagtttcaaaaaattatgctatgctttcaaaattaaattaactacgctcaattcagatattaatcataaaaaaatattttcttagttgtttgaacatattatatctaaatgttgtagtaatattttcactgtaattttatttcttatgtaaatattatttctttttttagctttaataaaagtttaagttttaattttcattagtaaaattacctatattaaaaatttagtttgtattttagttattttttcccataaataagacttcaatttcgtgatattatccataatttgagcattctaatcatagttttaataactttctaatttcaaattcaattagcctttccctttcatttctaatagtaaacttttaataacatatagtcttattacgttttatgtggatttcaattaacttataactttttgtaatatcagtataaactactacttattatttaatataatatagataaatatataattttcagatcataaaacaaatatatatatttttaaacagtattgctcgaaatttttaaaatttataaattttaattgtcacgacccaaactgctaactcaggtcgtgatggcgcccaacaccggagtcaggcaagccaacacttgtttattagcggtgttaccctatttcataagatgttcgaatgctagccgagtttttaagttataaatcgttaaatgaaaacgggtaagcgagacaacttaaatcaatgtaatccaaaatcatgagccaacatttacagtttagccaaaattaccataaagtctattatatgtgctagaacctagtgtcacaagtctacaggcgactagtagaatatacaagactagacaaaatgaatgtactactgtctgaagagaatagacagaagtattgtttaatataatataatttttaatttatttatttttaattaatttaatatataaatatcctcatactatctctattttttaatacattctcttccatactataaattttaattagtttttacattaatattttacctataattaaaataatatcatattttattttaaattgcaaaattgaattaggctaatgtattgagttctcttataattattttttatttagatgcaataaaatttcttttgttttgtagctttaagatataaatttaatttttaattttcattaataaaattacctatatcagaaagttattttatattcttacaattttattttaataatagaaaaataatttttaaattgtttgaacatattatatgtatgtagtaatatgtttactgccattttatttttttacgaaatattttttaaaaataattatgacatataaaaaatctcatctcaaattcaaataattcttatcattctatcttctaaattggaacgcagtttcaaaaaattatgctatgctttcaaaattaaattaactacgctcaattcagatattaatcatagaaacatattttcttagatgtttgaacatattatatctaaatgttgtagtaatattttcactgtaattttatttcttatgtaaatattatttctttttttagctttaataaaagtttaagttttaattttcattagtaaaattacctatattaaaaatttattttatattttagttatttttccccataaataagacttcaatttcgtgatattatccataatttgagcattctaaacatagttttaataactttctaatttcaaattcaattagcctttccctttcatttctaatagtaaacttttaataacatatagtcttattacgttttatgtggatttcaattaacttataactttttgtaatatcagtataaactactacttattctttaatataatatagataaatatataattttcagatcataaaacaaatatatatatttttaaacagtattgctcgaattttttaaaatttataaattttaattgtcacgacccaaactgctaactcaggtcgtgatggcgcccaacaccggagtcaggcaagccaacacttgtttattagcggtgttaccctatttcataagatgttcgaatgctagccgagtttttaagttataaatcgttaaatgaaaacgggtaagcgaggcaacttaaatcaatgtaatccaactgaataggaacatatgtaaagatacaagtaaggcacataaaggcatgcttgtgaatcctaaaatctacccaacataacatagtagtagctacgcacggactctcgtcactttgcgcgtgcgtagcccccacaaataagaataattcaattctttacatttacctatggggacaattccgtcttacagggttggaaaggagactcatctcgcgtagaacctacttcccgggtcaagaacgcgcccgaaattctcaactcgtcacccaaggactcgaaactagtcaaatattatataaatagtttaatatacactcaaaagtatggaattctcttactagtttagctaattcataattcttgaagaaatcccaaaatacacccccaggcccacatgctcggattccgaaaattttcgaagaaaacactcatccataacctaaggatcattagtatatagtttttgtatggtttcttggtagagaagtggtgaaattctctaaaattcatcaaccctagatttccactctaacccctttgatttgcactaatcgtgtgttaatctacctaagatttgatgtaataaaccaacatttaaatgaaaattacttacctcttagtaattaggccggataccctcttgtgagctctcaaaaatcgcctatggtggagaagaaacggtgaaatttggttaagtcccgtattaaatgagctcactcccttcagtgatctcgcacctgcggaggttggcaaggaggctggggatcgcacctgcagagggatttccgcaccagcggatcctctcctgcggagaaaggtccgcaccttcggatttggaccatctcccctggggccgcacctgcgaggccttgaccgcaggggcggtctcgcacttgcgatctgggcaaccgcacctgcggtcacaccagacctggtgcatggtttgtttggccccgtttggtgtctgggaggcacctgggcccacccgagcccccgtgcaattataccaacaagtcctaaattatattacggattcgctcgagccttcgaaacacccaaaacaacgctaaaactcaaaatcacacctcaaaacccctagaatcaaacttaagaactttaagttcttgaattcggttctaatgcgtcgaaccgacctatactactcggaatgacaccaaattttgaaagcaagtcacaaatgacataaaaaaactattcccgatctcgaaattacgttcggacctcgataacataaaaacacgttccaaaccaatttataaacctaaggaaactctattttcgctatttggcgtcgtaacgcccacgagtcatccaaaacctatttcggacatacgcacaagtccgaaatcatcatatgaagctaccagaactgtcggaatttgattccgaggtcgtttgctcaaaaggttgaccgaagtaacacttggccaaaaaggccaaccttaaggaactaagtgttcctacactcctttaaacacttctgaatcccgaaccacccgtccccgctagtcataaatcactataagccgctacgagaagtcttattcaaggaattagggtccaaatacgcaaaacgaccggtcgggtcgttacattctccacctcttaaacaaacgtcgtcctcgaacaggtctagaatcatacctgaagtgctgaataagtctggatatatgctccgcatgtcctcctcggactcccaagttgcctcctcgactggttggtccctccactggaccttcacaacagaaactcttttatatctcaactggttatcctgtctatcaataatggcaactggctcctcctcgtagcccaacctctcatccaactgaatagtgctgaaatcaaacacgtgagagaagtcagcgtggtaactccggagcatggatacatgaaatactggatgaacccctgataaattaggaggtaaagcaagctcataagaaacctctccaacttgcctcaacagctcgaaaggagctataaacctcgggctcagcttgcccttcttcccgaatctcataacacccttcatcggcgagaccttcaacagtaccttatctccctccataaatgctacatcacgcgccctctgatccgcataactcttctgtcagaactatgttgtgcggagcctctcctaaatcaatttcactttctccaaggcatctctcaccaggtctgtgccatataacttagccttaccaggctcaaaccacccaataggagaacgacatcgccgaccatataaagcctcaaatggagccatctcgatgctgcactgataactattattataagcaaactcggccaaaggcaagaactggtcccactgacctccaaagtcaatcacacatgacttgagcatgtcctccaatatctgaactgtacgctctgactgaccatcagtcagcgggtgaaataatgtgctgagatctatctaggtacccatctcactatgcaatgctctccagaagtgcgaggtgaactgaggacctcgatctgatataatggacaccggcacaccatgtaatcggactatctcccgaatgtagatctgggctagcctctcagaagtataagtagcagttacagcaatgaaatgcgccgatttggtgaatctatccacaatgacccaaactgcgtcaaccttccgcaaagtccgaggcaacccaaccacgaagtccatagtaatgcgctcccacttccactcaggaatgggcatttgctgaagtaggcctcctggtctctggtgctcatacttaacctactggcagttaagacacctaaccacatactccacaatgtctctcttcatccgtctccaccagaaatgctgcttcaaatcacgatacatcttcgtagcaccagtatgaacaaaataccgagaactgtgtgcctcctctagaatcctctgcctcaagacttcaacattaggaacacacaaacaaccctgaagtctcagaacaccatcctcgccaatagtaacctccttggcaccaccctgaaccactgtctcccgtagctctgccaaacacggatcatcatactgtcgagccttgatctcccccaataatgaatactgagcaaccacatgagctagaactcaatgaggttatgaaagatctaatctcaccaagcggttagccaaggactgaatgtccaaggctagaggtctctcctccgctgcaatgtaggccaaactacccatactctccgccttcctactcaaagcatcttctaccacattcgccttgcccaaatgataaaggatggtgatgtcatagtccctcagcaactcaagccacctgcgctgcctcaaattaagatccctttgtttgaacaagtgctgcaggctgcggtggtctgtataaacctcacaagataccccatacaactaatgcctccaaatcttaagagcatgaacaatctccgccaactccaaatcgtgcaccgaataattcttctcatgaaccttcagctggcgcgaagcataagcaatcactctctcttcccgcatcaacacacatcccaagccaacgtgtgaagcgtcgcaatacactctatacatcccagaatcggaaggcaatactagaactggtgctgaggtcaatgctatcttgagcttctgaaatcttgcctcacactcgtcagaccatcggaacggggcattcttctaagtcaatctagtcagtggggatgcaatggatgaaaaaccctccacaaatcctcgtgtgatgacccaaaaggtcatcttatgtaatttaagctatatctgtgttccgaggctccaagagcctctgttagtctcacctcgatatgcgtgcgcagcccgggcgtgtagccgagaagcttatatgtgaaaaactgacaaaagaatggttttgataattaataaatgaatatagttgactttggtcaacatttctggtaaacggacccagacccggacccgtgattcgatggtctcggagggtccgtaggaaaatatgggacttgagcatatgcccggaatcgaattccgaggtcccaagcccgagaaatgaatttttaaagaaaattgttttctgaaaataataaaggattttgaaaatgaataattatgtgaaaaccgtgttaccgggtccgtattgtggttccggagcccagaacaagtttattatatactatttgtcttatctgtggaatttggggtaaaacgggcgtgaattgagtggtttcggataaaaaatgaggttttgaggtcttaaagaatttgaaatgcgcttggaaagtgatgttatgttcccgaggtacaaatgagattccgagatcgggaatagttccgtggtgtcatttataacttatctgcaaagtttgaagtcattccgagcagtttaggccggttcgacgtattgaagtgaattctagaaattgtaaagttcttaagatttgattaaataagttttggggtttgatttcgagttccgctgttgtttttcgtgttccgaaagttcgagcgagtcctcttagtgatttaggacttgttggtatatttggacgggggctcgggtaggcccaggtgcctcccgaaccccgcgcgaggctaataaccagcagaaaccactgctggtgcacaacaactggtgtgaccacaggtgcggttgcccagccgcaggtgcgggaccgcccctgcggtcccagcctcgcaggtgcgacccaggcgccgcaagggcggctccgcaggagcgattcctttttccgcaggtacgaccccttctgggttggcccaagtccgcaggtgcgataccttttccgcacctgcgataccgcaggtgcgatcctttttccgcacctgcgataccgcaggtgcgagcccccttccgcaggtgcgaaaattgcccagttattttattaactccaaaacagacttcattacgggatttcaccctttctcacttccttcttcttccccaaaacctccatagacgaaattcaagccctccaacctccatagctccataggtaagtgttcttaacatcattttcccttactttcatcaattaatcactagattctaggcctaaaaacatagaaatcaaggtagaaattgggtttttgggatttttgggtgattcaaccccaatttggggtggaatcttaaaacaaattgtatattcttaatcgtggggatatgggtgatcgggttttggtccgaaccttgagtttcgaccacgtgggcccggggtcaaattttggaattttaggaagaatgattagaaatgggtaattaggctatgggtttgcgttattgaatcattattgatatacttgagttgaatatgtctagataatatcgtttcggagccggattataaaggaaagacggtgttagagggttgatcgctctattttggacccgaggtaagtgacttgcctaacttcggtgagggaataggtattgtttgctacgtgtttacttgttaagcatgttcgttgcataggtagagtgacgagtacctatgtgatgagagtctagcatgaccgtgagtctaacatgatagtaattgtagcttttcttccatgccttttatattatgaaatttgccattgtttgtaatagtatgttgatggttgtggtgaaagaatgagacgtaaattgttgttgaggatgaatacttgttgtcaaagctactctgttgagattggtacagttgagacccttgccgggccattgtgtgtttgatattgatatgtaccccctcgttgagcattattgtcttgcatttctattatattgaaatttccttgccattgatatttatactgttctggtaaggaagaggggtgatgttattgttatgcacgaggggacatgccgtgccgagtgttgatattgttatatatgcacgaggggacatgccgtgccgattgatatttattatatacgcacgaggggacatgccgtgccgatttgatatttgagattacgcacgaggggacatgccatgctctgttatttgattgattcccgtatactgatagatgtttcttcggtttctgtttttactttccagccgcattctcactgtactgttgtgaattagatgttgactacctgtatccccagcatgtacactccataacttattttatcgtttaagttccgatattattgctgccccgttaatatgtttcccctatttgttcccatatctcttctatttgatcatacttgtcttcattatcggttaattcttgtacatatatctgcttagattaggacaggtgatcgtattatgctaagtctagcctcgtcactacttcggccggggttaggcttggcacttactcagtacatggggtcggttgtactgacactacactgcacttccttgtgttgtgcagaccctgataccggaccccgtggagcgttctgagggagataccttcagtccacgtcagagctttgaggtatacactggcgtccgtggatcccgaggcttctttcctttaccgcttcattgtctttctcctttatttccaagacagtgttgtactttcattccagacttgtatttagtattctagtagttagtccgtgggattgtgacaccccggttttgggagtttacgttatttcatgattacccgcatttaaagtttcgttatctttattagcaatgcttgaaggattctgttgagaatatgaaagaaggaaaaacatgttatcgattttcggttaaatggttgtcccactattatctcattatgtaatgggaattggttgaagttgacaagttagcgtttttattccgtattaaatgattttaaattgctattgcaagttatacgttggctggcctagcgggttcaacgttaggcacagtcacggcctaaagggtgggaatttgggtcgtgacaagtcgatagtagcctgctagacccaagaaaatcccgatctctgtagctgaagtaggacgcaaccaactctaaactgcctcaatcttctgaggatcaaccttgataccctctccggatactacatgccaatgccacggaatccaaccagaactcacacttggagaacttaatatatagcttctgttcccgcaaggtctggagcacaactctcaaatgctgctcgtgctcgcccaggctacttgagtaaatcaagatgtcatcaatgaagacaatgacaaaggaatcaatatacggcctgaacaccctattcatcaagtcaatgaatgctgctggggcattagtcaaaccaaaggacatcactaggaattcataatggccatatctcgtatgaaaagcagtcttcggaacatccgaggctcgaatcttcagctggtgataccccgatctcagatcaatcttagaaaacaccagagcaccctgcaactggtcaaacaaatcatcaatgagccttattcttattcttaatagttaccttgttcaactggcggtaatcaatacacatccgcatagacccatctttcttctttacaaatagaactggagcaccccacgacgatacactcggtttgataaaccccttagccaacagctcctcaagctgctccttctactccttcaaatccttcggagctatacggtatgggggaatagaaataggctgagtgcctggagccacatcaatatagaaataaatatcacgattcggaggcatgcctggaaggtctgaaggaaagacatcagcaaactctcgaacaactggaactgaatcaatcgtcagagactcgacggtggtgtcccgcacataagcaagatacgccagacaacccttctcgaccatatgtcgagccttcaggaaggaaataactctactagctacactaactgaggaacatctctactccagcttaggcaactcaggcatggacaaagtaaccgtcttggcatggcaatccaagatagcatgatagggaaatagccaatccatccccaagataatctcaaaatcaaccatgtcgagcaacaggaggtctgctctggtctcaaagacacagaaagtgatcacacaagaccgatagatccggtctaccaccatagaatcacccacaagagtggacacatatataggagaatccaaggactcgcgaggaacatccaaaaaacaagcaaataagcctgacacatatgaataagtggatcctggatcaaatagcactgatgactgcctaccatatactgaaatagtacctgtgatcacggcgtctgaggccactgcatctgctcgggctggaatatcatagaatctggctggtgtacctgaagactgacctccgctggactgaatatgagctagctaagctccccttgtttggactccacctctaggaagacctctaccagcctgtcctctacctctaggtgaacgagtaactctgccgaacagccttgccccgaaacccgggacaagtcctcctcgtatggcctaactccccacactcataacacctcactggtggcatggcctgctgccctgaaaaagaaccctggatagagtctcctacgctacgctctcaactggataaatcgctttgtcctgatttattgaacaggtgccctgtgcgctgggggacggtgagaaccctctggcatggcactgaagtaaggactagaagacccctgatgacctgaatacccaccggagtaaacctgaatggctagtgggcggtaagaactctccggcatggcgctgaaataaggcctcactggagcaccatggggagtgatggaggagctgaatatggaggcctgctaggctggcctctgctgagctgacccctgctcctgcctggggcgcctctgaaatctccagaaaatctaactctcttgtcctgctgaccctgctctctgccctttaatcgataaccctcaatccgacgagctatctcgaccacaagctgatatggagtacccatctccacctctcggtccatgttggccctaatacctgagtgcagtccagctacaaatctccgcactctctcagcatcagtaggaagaatcataagggcatgacgagaaaactctgaaaacctggcctcgtaatctgtcaccgacatctgcccttgctccagctgctcaaactaataccgcaactcttccctctctgagggtggaatatacctgcccaggaacaactgagtgaacttctcccaggtgagaggaggggaacctgctggcctaccaaggataaatgactgccaccatctgcgggccctgccctctagctggaaggtagtgaaatcaactccatgggactccaaaatcctcaagttgtgcagtctgtccctgcacctatcaatgaagtcctgggcatcctcgcctctctcacatccgaagacaggagggtgcaatcgagtccatctgtcaagtaacttctgcggatcgccgtctgcagctggtctaagctcaggtgctgctgctgctggttgtgctccacccacgggtagagtacccggagtctgatatactgccgctgcatgacctgctccctcccgcctaagatgtggtaggatccgctggaaataaaccagcctgggtcatagtgtccatgaaccgcatcatacggcccatgacctcctggaagcccggtgcagtcatgaaatccatccgagctggatctgctgggggcacctcaccctgctcctcagtaatgggatcctctgctggatccactgggggtgctaatggaacaactctgggacaccctcgtcccataccgcgggccggtgccctcccccggcctcggacggcaggggtagcggcagctcccgggtcagaaacgtcagctgcacgaatcctcaccatctgtgagagaataaaagaacgatatttactaaaccatcgactgcacgatagaatatgaataaagagaggtttcctaacaccctatagcctcccgaagataaatacagacgtctctgtatcgatccgcaagactctattaggttttcctgtgacttgtgagacctacgtgaacctagagctctgataccatgttgtcacgacccaaattcctactcaggtcgtgatggcgcccaacaccggagtaggcaagccaacactagttcactaccgcagttacttcacttagttggataattaagtacttgccaaattttaagttaggaaatcatttaaagaaaacagtcaagtgatgcaacttgattaaatgaaactcaaaagatcgtttgccaacatatacgatatagaaaatacaaggaaagccaactacgtgtgccaagacctagtgtcacaagtctataggcaactagtggaatataccaaatagataaaataatgtacaactgtctgaaggggtagacagaaatatccaaaaaaatatagaaactccacagtgttgctgaggaacgccaggaagagcagctcaccgtgtagtctgatccagatagtaccctcaagattgcgctccggtatgataaccagatgcacctgccccagaacctgtacaattaaatatagaaccgtagcatgagtacatataaacaaatatgtacccagtgagtatcccgtctaaactcgaagaagtagtgacgagaggtagacgtgatacttactagggtcaataaccaataatataatttaataagtctagacagaaatagtagtcatggagatcactaaggcatgaagtatcaagtacataaaactacaatttattctcatgaatcacataacaattatcacaaaagtctcaaattccccttgcacaatgaacaatttattcaataatgacaatactctcagtcaaatatatagcacatagtatgccgaagcgtacggctgacgcgaaatgtgcactgccgagggtcgaacgagtcgaaccatagatgcatctattaccccgctcgcaaatcgatcatgtgacgcggttgacataattataaggctaccccgctcatgaatcatacatgcgacacgggtgctcgtacacatacacagaattatcaagaaattcaggaatttatcatggattatacttgaaaacagagatttaagcatttaaacttacgcataacttcctaatatcctcatgtcgaattcagagataataagcaactaggaacacatgtaaggatataggtaaggcacataaaggcatgcttgtgaatcctaaattctacccaacataacatagtagtagctacgcacggactctcgtcactttgcgcgtacgtagcacccgcaaataaggataattcaattctttacatttacctatggggacaattccctcttacaaggttggaaaggatacacacgtcgcatagaacctacttcccgggtcaagaacacgcccgaaactcccaactcgtcacccaaggattctaaactattcaaatgttatataaatacgttaatatacagtcaaaagtatggaattatcttactagtttagctaattcaacactcttgaagaaatcccaaaatacatccccgggaccacatgctcggattcaggaaatttttgaagaaaacactcacccataacctaaggatcattaatatatagtttttgtatggtttcatggtagagaagtggtgaaattctctaaagttcatcaaccctagatttccactctaaccccattgatttgcactaattcagtgttaatctacctaagatttgatgtaataaaccaacatttaaatggaaattacttacctcttagtagttagccgaataccctcttgtgagctctcaaatatcgcctacggtggagaagaaatggtgaaattttgttaagtcccatattaaatgagctcactaccttcagtgatctcgcacctgcggctcgaggaccgcacctgcgagctaaggctcgcacctgaggaagttggcaaggaggctggggatcgcacctgcggccaccagcggatccgctcctatggagaaaggtccgcacctgcggattttgaccatctcccctggggccgcacctgcgaagcgttgaccgcaggggcggtctcgcacctgcggtctgggcaaccgcacctgcggtcacaccagacctggtgcatggtttttttggccttgtttggtgtctgggaggcacctgggcccacccgagcccccgtgcaattataccaacaagacctaaatcatattacagactcgctcgagccttcggaacaccccaaacaatgctaaaactcaaaatcacatctcaaaacccctagaatcaaacttaagaactttaagttcttgaattcggttctaatgcgctgaaccgacctatactactcggaatgacaccaaattttgcaagaaagtcaaaaatgacataacggaactattcctggtctcagaattccgttcggacctcgataacacaaaaacacattccaaaccaatttatgaactcgaaactctatattcgctatttggcgtcgtaacgctcccgggtcatccaaaacccattccgaatatacgcacaagtccgaaatcatcatacgaagctaccggaactgtcgaagaaattcgattcggaggtcgtttgctcaaaaggttgactgaagtcaaacttggccaaaaaggccaaccttaaggaactaagtgttcctacactactttaaacacttctgaatcccgaaccacccgtccccgcaagtcataaatcactataagccgctacgacaagtcttactcagggaaacggggtccgaatacgcaaaactatcggtcggttcgttaaagcttgtgtgccctaacaactacccgacataacatagtagtagctacgcacgaactctcggcacctcgtgcgtgcgtagcccccacaattaaggacattttaatcatttacaatcaattatggggacaattacctcttacaaggttggaaaggagactcacctcgtgtcgaatctacttctcggaccaagaacgcgcccaaactccgaactctacacccgaggtctcgaaactagccaaatgttatacaaatatatcaattcatgctcaaagtatgaaaattctcctacttatttagtaaattcatcattcttgaagaaattccaaaaatcaccccgggcccacatgctcggattccggaaatttttgaataaaacactcacccataacctaaggatcattaatatatgatttttgtacgctttcatggtaactaagtggagaaatttcctaaagttcatcaagccctaggtttctaccctaactcttgatttacactaattagggtgttaatctacctaagaattgatgtattaaaccaacattcgagtggaaataacttacctctagtagctaggtcgtttggctctctctcaagctcccaaaatcaccaatggaggaagaaatggggtgaaaaatggttaagtcccgtgtttcaagaactcactgccatcagtgatttcgcacttgcggctcgaggaccacacccgcggtcttgcacctgcgagccaaggctcgcaccttcgaaagtggccaaaaaggcctgggatcgcacctgcggagggaggcctgcacctgcgataatggaacttctcccttggggccgcacctgcgaggcctggactgcaggagcggtctcgcacctgcgactgggcaaccgcacctgcggtcacaccagttcaggtgcaccagtagttaatgcagctggtttttggccttgtttggtgcgcgggaggcacttgtgcccacccgagcccccgtccaaatataccaacaagtcctaaatcatattacggactcgctcgagccttcggaacacccgaaacaacgctaaaaatcaaaatcacccctcaaaaccccttagaatcaaacttaagaactttaagttctttaattcggtttcaatgcgccgaaccgtcctatactactcagaatgacaccaaattttgcaagaaagtcataaatgacatgacgaagctattcctggtctcagaattcagttcggaccttgataacacaaaaacacgttccaaaccaaattatgaacttaaggaaactctattttctctatttggcgtcgaaatgctcccgggtcatccaaaacccattccggacatacgcacaagtccgaaatcatcattcgaagctactggaatcgttgaaacttgattccgaggtcgtttgctcaaaatgttgaccgaagtcaaacttagccaaaaaagccaaccttaaggaactaagtgttcatatactgctctgaacacttccgaattccgaaccacccgtccccgcaagtcataaatcccaataagccgctacgagaagttttatttagggaaaacggggtccgataacacaaaacgaccggtcgggtcgttacattaataatattttaagtattatatatttaatttattttattttctaggtgtatgatttataaatatcctcacattatctctaatttatttctattattcagttttgattttatctattagacttgagttacgtggacttatccatattatgacttttttaatcataatataagaactttctcatctcaaatttaaaatagttttaccctttttctctaggataaaaaatctgaatttttatttcttctctattgattctttacttttgatattacattattcaatacctaatattattacgttgtcatgttgtgatgacccaaggggtcattttatgtattaagaccccgttctaggcttgaattgacgaaagtctgaaattcggcaattttggtcgataatgaaaaattagatatcggggtcggaatggaattacagaagttggagtaggttcgtagtgtcattttgtatgcgtgtgagaaatttgaggtcattcggacgtggtttggtaggtttcaacatcgttagcgaattttggaagtttagaagttcttaggcttgaatccgatgttaatttggtgttttggtgttgtcttgagtgttctggaggttcgagtaagttcgggtagtgatatatgaattgtttgaattgttggttgaggtctcgagggtctcgagtgagtttcggatatgtttgggttgtgttgtgctcatttttcttatgtttcgacgtcgtttcttcgagcataaatgatatcatattgaacaaataatctttggtttctgttttgattgaagtattagacccgtataaccattacggacccgtagcaaaaagaatcatcgaatttggacatcgatgaggattttatggtcattttactaaggttgtccaattttttagattaattacgaaattgccactgacagtgtatatcaaaatctgcacgatttgcaaatattaaaacctacatatctccttcactataaggtcaaattgagtgattcaaaagcctaacttaactagaatttcacaaggaatccattggaggcataaaaagtgagtttcgggattgttgacatgaaaaacgagacaaaatagctgacagaaaaatatattaaataagggtttgttcattcggtcatatttcgagttggggagctcgaatttgagcgattttggaggcgattttcatcatagggattcagataagtgttctttactcatttttggttatgttccatgaatccatcttcatttttgggatttgatttatgattttaaagtgaaattgagggagttagggcttgagttttgaaggattttaggtagggatttgagggaccaaacggagtccgatttatataaattttatatggttagactcgggagaggacgggggttttgattctgccattttttcctaattttgagatgtgggcctgggggtcggatttttggcatattttgtagtttttattgtggaattcgattcgttagcctatgttgatggtattaatctgattaggattagattgagcgggttagagcaagattctaagggaaaaactgtaattgagtagtgagtgacctgcaaatttgaggtaagcgcttggtttaaccttgacttgagtgaataggaatcccaacttgattgttatgtgaaattgcttgtgtgtagtgtataggtgaggtgacgagtacctacgcactactaaatggttgtttaacatgatcccttttccgtttcccatttaatttcttcccagcttaactgttttatgattgttgaggtttacttggctaattgttttcattagattattgccaagtattgttgcaagtgtgttaaaagtggtggttgttccctcgatttggttatggtacttaaaggttgagttggatgacagcgttacaatatttacatatattctggttggtttcattatgaaataatattggatacagcttacgagctatacggttttctgtttgcaattgttgagataaaagtattatgaaaggcttggcatgaattgtgaaagttttatttaataaataaataaattaatagtgataagggtggacacgtgggatcggattgcatgccgcaacaagatagtgataagggcggacaaattgatagtgataagggcggacaggtaggatcgggttgcacgccgcaacaagatagtgatatgggcggacaaattgatagtgataagggtggacaggtgggatcaggttgcacgccgcaacaatgatagtgataaggtggacacttatgttttgcaatatttcaaaaatgttttgctggtttttggaactcaaggatttgaaacgtacagatttgaaaacttactgttttactctgttatttttcgtatttcgtacttacttctattttgaaagtcataactttaacgtgttggaaatctatgtgagatcttggttacaaatgaggcttggaataggcgactgagttattttatttattgttgcagtttatctttcttgtttgtgtagaatagttttcttgctttattatatataatgttacaggttaagttataattgccccgccttagcctcatcactacttcgtcgagattaggctcgacactaactcagtacatggggtcggttgtactgtactacactctgcactctgtagtgcagatccaggtaccgaccagcgttagagatttttagtagcgaaaatccattattcggagacacaaggtatatctgccggcgttcgcagatctctggaatcttctcttagttcatagagactattttagttttctcaaaacagatatattattttcttcagcccatatttgtagtattcttagaagttcatgaattgtgacaccagatcctggggtagtcttatagttatataattagtttgtggctcgggttatttattagtttattattttatttatgaagttattcgctggaaatcattagatctaatttactttagatttgttttttcgtgtttaattaaataatcaaaggaaaatggttaatcgaattctaacattggtttgcctagaaagtgtggtgttaggctccatcatgattcctaaggttgggaatttgggtcatgacaaattggtatcagagcactaggttgcctaggctcacaattcacgaacaagcttaatagagtttgaaggatcggtacagagacgtctgttcttatctctcagtggctatcaagttaggaacaatttcacttctattgtactctctcgtgcgaatttgttctatcattgatgattgaactcttctattcttgtcctctcgcaaatctcgacaacacgtaatggcgtctacaattggacaagaaatggagcccaatgacatctacgattaggggaagagacggaaacagagctcattctagagatcgaacatcagtacctatcgtaaagcctcaagtggatctagaagcggaggttctaacttagtcggtacgtgttggaacagttcaggttctagaagaattcatagctactccggtattgcaagacgcactagtccgtttattgaggttggacaagtttaccaaactatttcctctctatttcagtggtacattttgtgaggacccacatgattttcttgactgctgctatggagtattgcaaaacatgaggatagttaaaagcaatgggttggtttatacgagctgtgaagtttaacattgtggattatcaggcattgtgacctatgacttcgtgccaagtggggaagtccaccgtcaaggaataaacttcgggctaatgtgttatatcggttttggcctaggatgcataaagcctaagatttttgcaagagatgaagctgggacttacggtatgtctgcctccttaatgaccctatacctcaatacggaaggagttatataaacaactttaaatctataaaaggtctactcagcgtggaagtcacagttgccgattttggggtgctccagagggagtaccgtggttgacgaacttatagactatatggttcgtgacaaaaatttatttgtatagagttctacttttgggatcattgtgaatcaataggaataagagttaccccatagaataacgaagagtatgtgaataaatggagtagctcagcagtgttgagtcagcatagtaaaagaagaaattggtcgctggtatttgtagcaagcctatgaagaggacgaccaaccaatgcaacaccaactacttgactcaattctcataaatgttattgacagagtttgtttctcggactctccataatgcatggcgcatagggtttgaacagttgcgtcaggtcaccatgacggtgttaggatatgccatcaggtttgataagttagcccgtcatactcctactttagttcatatagccagagggcgagaccccagacccattaaaggactcaattatgattgtaaaattttgtacgactcatggcaagttgatacttcattttagctagtggtaggaattgcttagatgttaagagtgtccaggataaggaaaagaggaagctaaggagactaagaggtctcaaggttctaaaagattcagtagattttgctttgcaacaacaaattatttcggcaggggcttgggcaaccgaccaaccctgtcttcccttgctaagtttaccaacccagattgggttcccatggtaatggtattattgggaggtggtgtccgtgatgcaggtgatgccgctagtaatccccttgcgaattcttgcagagcctggctcacatactctgcaatcatttgctttacctgatcttgctctaccgtttgatcattatcattaacgttgttgttgttgttgttgttagatctttcttgggattattcccttgaacctcatggggatccagggggtgatggagtcccatttctttgctggttattattgttggagttcgacatagttcataggatatcgtttgaaaagtaaacaaagattatcagattcccggtaacagaaccaatttgtttaaccaaagaattagatccgttgactaaagctatttttaggatgaacacgggtttctgataatcaagaaataatgataattacgaatgagtaagtaaataagtaataagatgcacagaaaagtaaagtgtattttgttcgtagttcggatgatcccttacaagttaacttctattcccttatatagggaattcttcagtataacgtctacctcttgcaatgataacacattaatgattaattattatattaatgtaacgttacaatgaataaccgtaactgtcgcgtgaagtttgtgtaacgtgtggatcattaattgaagatctttgaatcttcccgtagctctgtccggattcattctgaccgtgtatcttccttgcctcaatcaagttgagtttcccgtagctcattacctcgtgggtatatagtgtcgtgcctctttgcctcgcatctccttatagagtcatgtccagtcgtcatgttttccttggtccacataactggctgaatcatcaagaattatcatacgtgtgaagatcatttttaccaatacaactctggctacgtgccccattgcagttacaactcaacttacatgaccaactaggaaaaaagggtcggactgtcgaaggtggaggtcagattcctagaggtggagacccagcatgttaatatattttctatggtatggttgaggtcgttatatcaaatggtgccattacaagacaatctatagttattataaagtgataatttccttaacttgattcggttatgagtatctaggaaagtcctcctaatatgctccactctcgggtgagctttgtaactctaaaatctacttatgtgaatacttgtattgagaaattctatggcgatagctatgtctataattacgtgttgtaattttgtttaaaggaaaatattgaaaggaagaaaagagaaggtttcgagtggcacgatatgcatattacttgtgattcagaattaaggacgagatcctcgcattttaatatgatttgatatgtttaaatcgggtgacgagccgcggtggaagttatataaggacgagatccttgtgatgacaaacttcttgtgtttaaattctcccttgtaaaattaaaattttactatagtactaaaatagggagtcatgcctcttaggtttatttgaaaaaaaaattgtataaaaattatccgtgcataatttgctgaattcgtgctataattattgagctttaacctacaaggtaggtgcccggccatgtggcattaaatgagacacgtttaatgagctttaacctacaaggtaggtgcccgcccacgtggcgttaaatgagacacgttaatttgggtatataattttgagttattcatgcgtcgcatctcattataagtattgtgaaggtttgaaaggagattattgttatcgtgaagctatgtgataattttgtaattagctatgaacaactattaagaaaatagaggcagtcaataactggcctagacccactacagccacggaaatcaggagtttcttggttttggtgggttactaccgtcgttttgtggaggggttctcatccatcgcagccccaatgactaaattgactcagaaaggctccccatttaaatggtcagatgagtgcgaggcgagttttcagaagctcaagacagccttgacttcaacaccggtgttggtgttaccatgaggttcaggttctttcacgggtattgtgatgcatctcgtattgaatttggtgcaatattaatgcaagatggcaaggtcattacatatgcgtcgcgacagttgaaggttcatgagaagaattatcctgtccatgacttagagttggcagccattgttcatgcattgaagatttggaggcactatctttatggcgtgccgtgtgaggttttcactaaccatcacagtctccagtacttatttaagcaaaattatctaaatttgaggcaacggagatggttagagttactgaaggattatgatgtcactatattatatcatcccgggaaggccaatgtggtggccgatgcttgagtaggaagtcggtgagtatgggcagccttgaatttattccggttggggagagacagttggccttagatattcagactttagataatcagtttgtgcggttggatatttcacccggcagtattttggcttgtacaatcgctcggtcttttttaatagagcgtattcgagagcggcaagatgatgacccacatttgatggttcttagagatatagtttggcacggcggtgccaagaaggttacagttggagatgacagtgttttgaggatgcaggccgtaaaggtgtgcctaatgttgatggccttcgtgagttgattcttgaggaggcccacggttctaagtattctattcacccaggagaaaccaaattgtaccgggacttggggaagcattattggtggagaaggatgaaaaaggatattgttgtgtatgtggctcgttgtttgaattgtcagcaggtaaaatatgagcatcagcgatctggtggtttgcttcagtagatagaggttcctgagtgaaagtgagagcgtgtcactatggacttcgttgttggactcccacgggctcagagaaaatttgacgcggtttgggttattgtggatagacttactaaatcaacacatttcattctagtggcaagtacttatacttcggaaaggttggcttagatatatattcgggagattgttcaccttcatggtgtgcccgtgtctatcatttctgatcagggtacacagtttacctcgcacttttggagggcagttcatcgtgagttgggtccccgagttgagttgatacaacatttcatccgcagacggatggacagtctgagcgtactattcagattttagaggatatgcttcacgcttgtgtgattgactttggaggttcttaggatcagttcctgccgttatcagagtttgcctataataatagttatcagtcgaactatcactatatgctagttggatggtttgagccatgagaagctcggttattaggtacagacttagtgcgggaggccttagataaggtcaagattattcaggagcgacttcgtgcagctcagtctaggcaaaagagttatgccgatcgtaaggttagagatgtagcattcatggttggagaaagagtattacttcgggtatcgcccatgaagggtgttatgagattttagaagaagggtaagttgagacccaggtatatcgggccttttaatattcttcatagagggggaggtggcttatagactcgcgttgcctctagggttatcctcagttcatctaatattccatgtgtctatgctccagaaatatcatggtgacccgtcccacatgttagatttcagctctgtccaattggacaaggacttgacttatgaggaggagccggtagccattttagacccgaaggttcgtcagttgaggtctaagagttatccttcaattcgagtgtagtggagaggccagcccgtcgaggcagctacttgggagtccgagtcggacatgcagagtaaatacccacacttgtttgccaattaaggtaattttctatatcagttcgaggacgaacgtttgttttagagatggatattgtgatgacccaaggggtcattttatgaattaagaccccgctctaggcttgaattggcgaaagttagaaatttggcgattttggtcgatagtggaaaattaggtatcggggtcagaattgaatttcggaagttgaagtaggttcgtagtgtcatttgtgatgtgtgtgcgaaatttgatgtcattcagacatgatttggtaggtttcgacgtcgttaacgaattttggaagtttagaagttcttaggcttgaatccgaggttgatctggtgttttggtgttgtcttaagtgttctggaggtttgactaagttcgggtagtgacatatgacttgtttgaattattggttgaggtctcgagggtctcgagtgagtttcggataggtttgggttgtgtgtgctcatttttctcatgtttcgacgtcgtttcttcaagcataaatgatatcatattgaacaaataagctttggtttctgttttcattgaattattagactcgtatcgccattacggacccgtagaaaaaagaatcatcgaatttggacatcgtatgaggatattatggtcattttactaagattgccagattttttagattaattacgaaattgtcactgacggcgtatttaaaaatctgaacaatttgtaaatattaaaatctacatatctccttcattataaagtcaaattgagtgattcaaaatcctaacttgactagaatattacaaggaatccattggaggaataaaaagtgagtttcgggatcatttgaaatgaaaaacgagatagaatagcgcagaaaaaatataaaatgagggtttgttcgttcggtcatatttcgagttggggagcttggatttgagcgattttggaggcgattttcatcatagggatttagataagtgatctctactcgttgtttagtatgttccatgaatccatcttcgtgtttgggatttgatttatgattttaaagtaaaattgagggagttagggcttgagttttggagggttttaggtagggatttgagggaccaaacggagtccgatttagataaattttatatggttagactcgaaagaggacgagggttttgattctgtcatttttgactgatttcgagttatgggccaggggtccgatttttggctgatttcggatttttggcatattttatagtttttattgtggaattcgattcgttagcctatgttgatggtattaatctaattatgataagattcgagcgggttagagcaagattttaaatgaaaagttttaattgagcagtgagtggcctgtaaatttgagtttaatgcttggtttaaccttgacttgacagaataggaatccccaacttgattgttatgtgaaattgcttgtgtgtagtgtataggtgaggtgacgagtacctatgcactactaaatggttgtttaacatgatcccttttttgtttcccatttatttgcttcccggcttaactgttttatgattgttgaggtttatggctaattgttttcattagattattgcaaagtattgttgcaagtgtgttaaaagtggtggttgttccctcgatttggttatggtacttaaaggttgagttggatgacagtgttacgatatttacatatattctggttggtttcattatgaaataatattggatacaacttacgagctatactattttttatttgcaattgttgagattaaagtgttgtgaaaggcatggccttaattgtgaaagttttttttaataaataaataaattgataatgataagggtggacaaattgatagtgataagggtggtcatgtgggatctgcacactgcaacaagatagtgataagggcagacaaattgatagtgataaggatggagagatgggatcaggttgcacgccgcaacaataatagttataagggtggacacttatgttttactggatttcaaaaatgttttgctggtttttggaactcaaggatttgaaacgtacatatttgaaaacttactgttttactctattatttttcgtatttcgtacttacttctattttgaaagtcataactttggaagtgttggaaatctatgtgagatcttggttacagctgaggcctggaataggcgactgagttattttatttattgttgcagtttatctttcttgtttgtgtagaatccttttcttgctttattatatataatgttacatgttaagttataattgcctcgccttagcctcgtcactacttcgtcgaggttaggctcgacacttactcagtacatggggtcggttgtactgtactacactctgcactcttttgtgtagatccaggtatcggccagtgttagagatttttaatagcggacatccattattcggagacacaaggtatatctgtcggcattcgcagatccctggagtcttctcttagttcatagagactgttttatttttctcaaaacaaatatattattttcttcatcccattatttgtagtattcttagaagttcgtgaattgtgacaccagactctggggtagtcttatagttatataattagttcgtggctcagattatttattagttcattattttatatatctaatttactttaaatttattttatcttgtttaagtaaataatcaaaggaaaatggttaatcgaattctaacattggctttcctagcaagtgtggtgttaggcgtcatcacgattcctaaggttgggaatttgggtcgtgacacatgtggatttttattagcttttctgaatttaatatctatttctaccacactcattctggtataatatagataaaatttttaaaactttctcaaattcaaataagtttctgtcacgacccaaactggaggatcatgactagcacccaggccatacttgccgagcaccaacatacattttatctaaccttcttattatctttaagggataacgagatcaatataaatggtagatatggatcatgaacatacatcacatgggatgacaagattgctaagaaactacataaaaggtacgagctacaacgctgccatgaaagactatacaacaaaaattatccaacaaggcataccaaactatacatgagttgacacctgtctgtgagcctctaaaggagcataagtaatgcaacatagctggaacagggccccgccatacccataacatctataacataaatgcataccaagaccacggcaagtccggagaagggatctcgcctataaccgctaaactggaaagcttattgtggtgggggagctgtgtctacctgtctatcaggacctgtagcacgacatgcagcgtccaaaaataaaaggacgtcaatacgaataaagtgctgagtatgtaaggcaggaaagcataaataagaacagtaatgtaaagagagatgtaggagatacaacctgtagcatctgagtgcttctaagagacagtaacatgaaatgcatgatacatatatacatataatattttaaaaacatcctcctctgtgggcatcatcattatcatagaacattcacctctgtgggcatcatcatcatcatagaacattcgcctctgtgggcatcatcatcatcatatcatacccggcctcaaagaggactcggtaaacccaactgatcagtggttgcacaataggttccatacccggccgactatagcgcggctcagtagattaaaatagctacatatatatatatatatatatatatatatatatatatatatatatatatatatatatatatatatatatatatataaaatgcatgtaggactcattggaatcagattctgaaccttttgaagtgacgtaaggtcgatattctccgtacatgttattaggattaactcttcatcaagaatcttataataatcaggaagtaccaacaacaatgataacataagaataagagaagcaacctcaaaatcaattgttccataagaagggaaacagtgtaagtactgctagcttctaagagtagagtatctttggaagctcgttcattgcattatgtacaatcggagtcgtgcaaaagaaggaaaggaatagcctcacatccttgtatatactgtaccaacctcaagctacgcaaatgtcacaactccttaatctactataagagaaacgacactatcgttatcgtttaagcgtcacaactattatgtatcgaccacaacctattttacgatgaaacggtcagaaccttccctatttatatgacttcacacaagtcaaaaaaatcacctaacagcccaaacaacatcaataataatcatattgagcctcccaaaatagtccacacacaacctaatcacttcacacataagacgaccaccgtagtcgtgtcaaacgacccggaaatgttacaacgaacgaccagatcacaaacctacatctatatggtgtttatccacacccttaatcctccaaagctccacaaaacagtagtaaaacacgcagcccaatagaaacacaaaatagttcgctacaagtcaaataactcgaactcacggcttctggtcaccgtcccgtaagttctaactattaggaaacacatttatcaaacttccttgatatttcaacccttaaatacagatattagacatttcttaactattaagtaacttccaaaactctacctacaaagaaaaagatgaggcggtataatgacacttacgtcgtacggatcgttttgatgttattgcttctcgatttcatgcccgggatgatattcttctttgaaaccctagtagatagcttgaggttatgtttatgagtgttttttggtcttttgatgattaaaaatgaagagaaagccgacctaatgtttatatatatcaagtttggaaaagtcaaagaggtgctagcttggcaccctaggattggtccatcttccgatgcttatatatcgttttatcttgatgtcgtatgcatgaacggttaagagcatcagaaactacattccaagactttcaatttggtatataatgtcccaataagacctcatataatacatgaaatgtatttctcaaaaagctctagtgatccacctacttgtcacctatgatgtctgcgcagtctcgcaaatttgcaaatatctctctactcctatgttgtatcgatgaacgatttaatgcgttggaaaccagacgcataggtcttcagtttggtaggtagatcatcccctaattccaagtatacaatctcagttacatttgacctaatgttaagcacattatgagtgtaacttgtgaagacctttgccaacttttgttccaccacttgcttgacttcaaaacttagaacacaactatcatacgataaatattaaatcatagcataacctccttatcatataatgcaccatagtctcaccctaaagtacatgttataacatttcaaactcgtcgactttctacgaaacttattttcttcaattggtttagcttctaagctttctaaccctcttggtactcgttattcatgatcttaaatatttttaacctccaacgtaacatgattaacttactttatattccatcaaatagaatcttatttatgagcttacatcaattgacttacgatgtactctcatgtacgaaaacatggggtgtaacatcattccccccttttgaacattcgtcctcgaatgttgactaatgcacttttccatatcttaagcaataactcttacgaataatttaatatcgtctttgccatcttgggagttgttcggtgaataaatccaaagtctataacattcccccctttaggcctctttctcacaccacgacttgtggtcgaactcctttcaatgtcgtaactatttctaccttctttcatgcagcagacaattctaaccttgaatgtgcgccaatgcgactcttatatccttttttatttcttgttagcttttaacctatctttaggattcacttggtgagcttatattgtactatgaaaagttgtccctctgggcatctataggtgtactaatgttctttgtttggtattttgttgaacttacgactattgctatatcttgtttcatagcctcagttatctatgcttatggctttgccactactaggtaggtcatactataccataactcttacttcggtttattattatggagacttgccacccaactccaggtttttctctcaccgcttatcctatatgtataaatctaagccattcaacgcttccttattaccgttcatcttaataatgacagcataatctcatctcatactttgtaactttcatccattcattgttgattcaccttaatattgatctataatctaccactgataatttaaaatctcttatgtaatatatcgtcactagggctcacctctcatcggggaacatctgaagtgattttcctgatccacttagggacgatactatactccagtaactgtatttcatagcattccaatgtgattcatcttatgcgtgtattctaatcccatgcagttcatgaaatacttgttctcaaaatcattactcaatcaaaggtctaaacgtcatcctcttatcatttatcacaattacacccttactttactattatggtagcattctatctcttctaaatgctcctagttttaaactcctttgagttcactcatgctatactgagctttttataactgtatggaaaccattagctctcttattgtgatgggtttaatcctgaggaattacctattttcgtcaccttctcactcacattttcttatccttactcctgcctagctaaaaccttgttgctctaccatactttagcttgcgacctacgcacatctacttatactactcgtaacattcctttcatcatgttagcaccatagatttcctttcacgccttctcagttgtcttaaatgtaaacaattacttttcctggtcgttctgccacttgatgcatggatacttggcctatcttagtgcccatgaatacgggagttccctgtaactcatatggtctcaattatcaacttttgattgatttttttcttcttcttccgttcattagctacaataggtgccactttcttatggagtgcatataacattatagtgatattgctgttacaagaccatttctactttagttcactatgcttatgttgaagcctgcttccttatatcctcagctagtctttcgttgtagtacttagggaagaacttctaactcttataaagttgagaccttattacattgtatatcccacggtatttctgatgttcttactcgcctatcattatctttagttacttaccttcatgcccttgagcttgtagggtttcttgtgaattgaaagttcagttgtcttcattgtggcactctcttttatttccataacacttatattataccttctactaccccaactcctgtctgaatatttctcgaggattacgattttgtatctaagagcctgaatttcctatgctgggtttcactacgtttatcttgcatgatctactgatttgcctatatcctcctatctagccataactaggctcttcctgaatcaactactgactacccattggtcaactctcatatctttattttatgtaacgcctcttgggttatgtcctttgccttaacttacctcttgtacgggatccttatgtatcaagtgttcattcccatttatatatcaatatcatcgagtgcgaaacccttattgattctccccaacatcatgcttgcataatgttctggagttatattatatctgtaggatatgaataaatgcaatcttattcctttcaccttttaccacattcttcctttaccatttgatatttacctcttcatctttggcattttgtttctacatcttcacagacattactcgccttgcggtaacccttctacactaggtataactgaatttcgtacagacaagggcgacacatggtataactggcacatttagtcccttaagcttaactctgctcatagtgcttgctttagggaagtgttttcgtgaatgacctttaaaggttattcttctattgttcattctattattgtcggaacactatctttgaaatgatgccgactattaccaattcatgtgatccctaattcatgttcggttttttttttcttgtttactatcccatactaatttttattacttgggggtctaacttttccttatggtaatcacgtgtgagtcaccaactcatttctcgaaataagggtatggctttatggcttatacttttgtattgtctcaaggccagtctcctctcatttttttcttcacttgactatagactttatcattttaccatattttgatttaccgctatcactcatttatcacctcttactcataatgattcatttactctcttcttattctcatgctaatatctctgtctatcgccctattataaagactttaacatgacgttatttcacatttagctcccctacttcatatcactggctcttcgggacgcctaacattcttcttcttcttcttttttttttggcggctagagtcatactaaggcaaatatttatcccttctaggatcctagtgcctatcttctgaaatttctgaatattctagtattcatatctgattgttctattctagagtgaccatatgactatctctaaatgagaactattaccatgttctgcactacccttcaaaaatgttaaataatgataagaatctatccataattttcggttactctaaccccagctagatcctgatatcctatccttctctaaaattattttagttagctcccattgggcataattgagattggtatggacaattgtagatatctctgttaccgttgaaagtaactaaaaatgcttatatttctctgccagaattataaatactgataatctttattaactaggtacctcgtacccttctttatcttgcttcttttacttgctaaaactcgtatctaccttctgattctcttatttctttttaccatatgggtagatagatattctttccttagagctccttattaagaaactaacacatcttagtatacacatgatctgctgaagccctcacatttactcatcataagcatgatgcaagattgagttcctctgactcaactcttccacagccactttgcaatctcttaccatccacctttctagatgtatgcatcgtcgtattataaataagatagaattgaggaaatcgagttcttacgattgagctctaccacacgatctagagtaagaagaaagagtaacagccctaaatgccctgtagcctcttgcttataggtgtggtgcacaacacacccataaacaagactctactaaaggtggctaacgggccggttcaacccgggaccggaccggcccagaccggttcaaaccgggaccggaccagaccggttcataagtggtcgggtggggctgggttaaggggttaggggggttggaacggattaaatttttaaaatgggtaaccagaccggaccaacccggttcaaatgaacagtacctgaatcggttaaaccggccaggcccggaccggttcaacgttaaaaaaaaattttgtttttttttaatttttaaaatgttgtgggtcccactagccgttggcaacggtcacccatggcagggatccgttgcctaacgggtaatttgcgaaaatagcccattttttctttaaaaattaacctattttcaatttacataattaaccttctctaaaactataaataacccccccccccccccctctcttcttcatttcttcactcaactatcatttctcaatctcaatttctctcattctcattctccaattttcaagacttcaagtcttcaattcatcttctaattttatttggctcttttatttggaatttaatttatcgtgttttatcattcggattttgaagtttgaacaattgaacttcaaaattgaaatacttgcttgacgtttgatttagagttgcgtaatcatcaagtgctcaatttactgccgaattcggtgcactctctccaactctttctcttatttattattttatttgcatatttaatttttgcttatacttaaattttacaatatgtttaatgctgctaaaagattgtgtagaaaagttactggtaggggaaataaaagaagaggtagtccttcaacatctggtagtaatagtaatatcccatttacacatgtttccgaaacttcgcctaatgataatatagattatgtaacaattacaagaagattttggaatagaagataatgaattagaaatggaagatgaaatgccagttacacctactagtgcagcacctggtagtgttggagttaccacaaggggtggtggtcgtggcactagtagtagaccacctgtggctccgactagtaatcgtagaaaaagaagtaaggtttggaatttttttgcggtaattgaaggtactgatagagtttgctgcaaaatttgtaataatgattttaaacatatgactggaggaaatttaggggggactgggactcttactagacatatgagaattgatcatcccatagaatggggctctgatggtgatggaaatcaaacaactcttaaccctactactggaggacttatgaaatataataaaatgaaggatcgtgaggagttagcaaaaatgattgctttgggtttctacctttttcttttgcttcttcatcatatcttattatgtatattcaaaggatttataatcctttatttaaaggtatccctagaagtacttgtagagctgatatctttagattgcatggtcaatatcaaacatacatacgttatttgtttgaacaccttccctgtagagtttctctaacttctgatattggccatgctgttatcgcttttaaatatgatgaagatcagagtcatactgatgtttttataagtagtactatttgcgaagttgttcaattttataatcttaaccaaaaagtattgtgtatgtcttttgataatgcttctaacaatactgccgcaatttcattattaaaaatgcatttgcaaccgccacttgaagaaatttttcatgttaggtgtgcatgtcacatttataatttaattgttaaaagtggccttgatttattttcaactaagattattcatgttagaagagcagttggtgttattcaaggaaataacagacattctagaattaagaaatttaagaataagtgtaccgagtataatcttaaaccaagattcatgccagacgaaattgttactaggtggaattatacttatatatttttaaaatgttgctataaatatagacttccaataactgaagttgctaatgcgcattgtactgatagaaaccgtatgttaacacctgctacctaggaggtcattaatgatgttattcaatttttacataaattttatatagctactgttgagtttctggagcatactaccctactgttacaatgattttagtacatatagctgaaattgcttttctactctttaaatttaagaagaaagaaaaaatatacggttgctgttgaagaaatgcaagacaaattcaaaaaatatttcttttcaatttctcagatttacttaattggcgctgttttaaatccttctattaagatggctgattgtcaccaattaatcaatgctttatatacttacatggagattggaccaactgaaacctcagatatttttacttgtatgaacaatctaaatgataatttacaaaaattatataattattatgcaaatatacttgatgatgttgctcttaatgtaggcaatgttaaccccaatatgcagtgtaccacttcttcaagttctactactttgtgtgatgatgaaatagttgatagttataatatttttactacatttgctacaactcaaaccagtagcagggacattgatgaacttaatttctacttgcagaagcaaaaggagatgcgcacaaaggaattttcagcgttggatggtggcgtgaaaatgaaaagcaatttcctgttctttccgctatggctcgggacgtgctgaatgtgccaattttaactgttgcatcagagagtgcatttagtcaagcaagacaacaactaggagacacccgtcactcattgggaagcaatgctttggaagttttagtatgtttcagagattagattagatcggaacgaagaaatcaaggacgtgaagatgttgatagcccagaagacgaggaaattggagatatattaacacatggtaacccatctgaatttaacactccagaagaaggacaatcagttcatattgattatgaagaacttacaagggcgatgcaaaacctttgaatttagtacttgtcaaatttagtacttggttgtaacttgtaagttgtaagagttgaattttgaaatttaaaatttgaaaattgaaatacatgttccacttgcaatttataagtgcaattttttccataatcattgttatctttatatattttagtattttactttatattttatttaaaatacgtgtacaaaaaaatttaaaaaaaaattaaaatattaggtaaccggcccgtacgggttattttttacccggataaacccgaacccgttaaacccgttaacaattaaccataaccggcccggtttgtaacccgtccggttcctaattttccctacccagcccggcccggcccacccggttaacacctttagtcactctactagacacgactcatagataacccctaggacagacttgctctgataccaagtttgtcacgacccaaactggaggatcatgactagcacccgggccatacttgccgagcaccaacgtacattttatctaaccttcttattatctttaagggataacaagatcaatataaatggtagatatggatcatgaacatacatcacatgggatgacaagatttctaagaaactacataaaaggtacgagctacaacgctgtcatgaaagactatacaacaaaattatccaacaaggcataccaaactatacatgtgttgacacctgtgtgtgagcctctaaaggagcataagtaatgcaacatagccgaaacagggccctgacatacccataacatctataacaaaattgcataccaagaccacggcaagtccggagaaggggtctcgcctataaccgctgaactggaaagcctattgtggtgggggagatgtgtctacctgtctatcaggacctgcagcacgacatgcagcatccacaaataaaaggacgtcagtacgaataaagtactgagtatgtaaggcaagaaagcataaataagaacagtaatataaagagagatgtagaagatacaacctgtaacatctgagtgcttctaagagacataatatgaaatgcatgatacatatatacacacaatctttttaaaacatccacctctgtgggcatcatcatattcatagaacattcgcctctgtgagcatcatcatcatcatcatcatcatatcatacccgacctcgaagaggactcggtaaacccaaatgatcccgtgagttctaacaattaggaaacacatttatcaaacatccttgatatttaaacccttaaatacatatattagacgtttcttagctattaagtaacttccaaaactctaactacaaagaaaaagaagaggcggtatatacatatatacacagaatcgttttaaaacatccgcctctgtgggcatcatcatcatcatagaacattcgcctctgtgggcatcatcatcatcatagaacattcgcctctgtgggcatcatcatcatcatatcatacccgtcctcgaagaggactcggtaaaaccaactgattagtggttgcacaataggttccatacccggccgactatagcgcgtctcggtagagtaaaataggtacatatatatataatgcatgtaggactcattggaatcatattctgaacctttcggagtgcataaggtcgatattctccgtacatgttattaggattaactcttcatcaagactcttataataatcaggaagtaccaacaacattgataacataagaataagagaagcaacctcaaaatcaattgtttcataagaagggaaacaatgtaagtactgctagcttctaagagtagagtatctttggaagctcgttcattgcattatgtacaatcggagtcgtgcaaaagaaggaaaggaatagcctcacataccttgtatatatggtcccaacctcaagctacgcaaatgtcacaactccttaatctactataagagaaacgacactatcgttatcgtttaagcgtcataactattatgtatcaaccacaacctattttacgatgaaacggacaacacctcccctatttatatgacttcacacaagttaaaacaatcacctaacagcccaaacaacatcaataataatcatattgagcctcccaaaatagtccacacacaacctaatcacttcacacataagacgaccaccgtagtcgtgtcaaacgacccggaaatgttacaacgaatgaccagatcacaaccctacatctatatggtgtttatccacacccttactcctccaaaactccacaaaacattagtaaaacacgcagcccaagagcaacacaaaacagtccactacaagtcaaataactcgaactcacgacttccgatcaccgtcccgtgagttctaactattaggaaacacatttatcaaacatccttgatatttaaacccttaaatacagatattagacgtttcttaactattaagtaacttccaaaactctaattacaaagaaaaagaagaggcggtataatgacacttacgtcgtagggatcattttgatgttattgcttctcgatttcatgcccgggatgatattcttctttgaaaccctagtagatagcttgaggttattcttatgggtgttatcgggtcgttttattcttaataatgaagagaaagccgacctaatgtttatatatatcaagtttggaaaagtcaaagaggttctagcttggcaccctaggattggtccatcttccgatgcttatatcgttttatcctgatgtcgtatgaacgaacagttaagagcattagaaactacattccaagaccttcaatgtggtatataatatgtcccaataagacctcatataatacatgaaaggtattgctcaaaaagctttagtgatccacctacttgtcatgatgcctgcgtagtctcgcgaaattgcaaatatctctctactactatgttgtatcgatgaacggtttaatgcattagaaattagactcataggtcttcggtttggtaggtagatcatcccctaattccaagtatatcgggagaaaaactcagttatatttgacctaatgttaagcacattatgagtgtaacttgtgaagacctttgccaacttttgttccaccacttgcttgacttcaaaacgtagaacacaactataatacgataaaaattacctcatagcataacctccttaacatataatgaaccatagtctcaccctaaagtacatgttataacattccaaactcgtcgacttttgacgaaacttattttcttcaattggtttagcttctaagctttctaaccctcttggtactcattattcatgatcttaaatatttgtaacctccaacgtaacatgattaacttacttgatattccatcaaatagaatcttatttatgagcttacatcaattgacttacgatgtactctcacgtacgaaaacatagggtgtaacagtttcattattctaatttttaaatttgaccacattttcaaaaacttatgttatgcttttaaactaaaattaattgcaatcaattcaactattaatcacaaaaaaatattatcttaattgtttgaacacattatatctgaatgttgtagtaatatttatgtataaaatattcgtttgtccggtttataaatattaatatgacattattattcttgttattcaaatattttttactgattatttaaggtttttcttaccttataaatagtttatatactttatgtaagatcttattttgccgcttgaattatttaatttttaaactcaataaatctttagtatcttaagtaaattttaattttattttaacttacttcaaagtataaatagtgtaacgacccgaccgttcgttttgagctctagcgcgtcgttcaacgattggaagtcatgaacaacttcatttcaggtattatgacttgtgcgtatggtcgaagttgaaatgcaggaagttcggagttagattgaaagggaaaatgttcatttcggaagccttaacttggagaaacttattaatattggaattttgagaaaacgacttcggaatcaggatcagaaggttctagcaggttcgtatgatgatttcgaacttgggaatatgtccggatcgaggttaggataacccgggagcgtttcagcgtatattgtggaagttagcattttagaagaaatttcctaagtttggattggaaggcatttcagagatattgatgtccgattgggattccaagtcttggaatagcttcgtatggtgattctggagttgggagcgcaatcggaagtgaattcatatgtccgtaggttattttgaagtcatttggctaaagttagaaatttgaaggtttttgaagaatccgaccggaagtggaaaatttgatatcgggtcggaatgcaattccgaaagtttgagcaggctcgtaatgacgaatatgacttgtgtgcaaaatttgggatcaatcggatatgattggatgggtttcggcgtcggatgtagaagtttgaaattccaagttcataaagatgaatttgagtgcgattcgtgctttcggcgttctttgatgtgattcgaggcctcgagcaagccgcattatgttttgggataggttggtgtgattggacggggtcccgggggcctcgggtggattacaggtggaaaaaattataccagcacagatcaagattgaagttggaaaagagctgaagttgctgtcatctggtgtgaccgcacctgcgaggctttggccgcaggtgcacagccgcatatgcggtttatgggccgcaggtgcgagaagtggctagcttggctgggaccgcaggtgcgaggcattttccgcacctgcaaaagcgcagatgcggcgtatggatcgcatgtgtgagttttgactggagtcgaggaagtcgcaggtgcgagagtcggggcgcacctgcagaagcgcaggtgcgagaggtggaccgcaggtgcagatatcaggcatgggcagattgtttttaaaccgtgaagttttcatttcttctcctaattttcatatgttatgggcgattttggagagcatttcaagaggggtttcatcaagcattagagataagttgtttctactcatttctaagattaaatacatgatttttacatggttttgatatgagaaattgagggaaatttgggaattttgaagaaacctagaaaagttgataaattggatttttagccacgaatttgagcatgaatatttgagtaaaatgtatatttgaactattaaaactatgggtagagtttatcttcggaaatttcggaatccgggcacgtgggcccgagggcattttggtcaattcactgagcggagctgggaaattatataatttggatttgttaccaataatagagtatattttcattgatttgtcgttattcggatagtttgggggcgttgtgcatccatcggagtcgtcggaagggcttggaagccggttatgaatcttcggagcgaggtaagtctcctttctgactttgtgagggggaattgtccccctaagtgaactaaatgaatatatgctattacttgcgggggctacgtacgtacgaggtgatgggagtccgtgcgtagctactgtcatgccatgtccgggtagttttggacccactagcatgctttacttgttgtcatgttgaatttatcaatgatattagcctggtgagatgatcgagttagtgattgaatactaaaaaggttagaacttattttccttaatcaaatgagaaaagaatggatccttccttgtataattgtgttcctgataaggttatattattgaacattattaaacttggcaaatgaatttcaaacatgatttaaatactatcttcaggttcacctaaagagaattttagcattttcctgagaagttgtttcttgataaacatgtgaatttattatgtgaatacgtgtacatatgagcacctgagttgcaggtatgattcgcgagcagtttagccttattattatgttgatcgcgtcgcatgatcgattcacgagcagggaaaatagatgcatctatggttcgagccgttcgaccctcggcagtgcacaatttattattgttggtccccgtcgttcgaccctcggcattcttgatttcgcatgttaaatgctgcgtattttttgtgatttacacatgataaatgctgtatattttcctgtgatttatacatgtttatctgcctaagtatattatgagttgccagataaaaatgaaggaggacttatgggaaaagtgtgggacaaactgatatttattgataattcttatctctgattattgtttatttgattaagatacttatgcttagcacctcacttgatcatatttatccgacttatagcaagtgtctaattgacctctcgtaactacctctttgaggttaggcgggatacttactgagtacacgttgtttttgtactcatactacacttgttgtgcattttgttgcacaggtaccttcatagcagtggttgacttggagacttaaacgggctgcatcatccggaggcgttccgcagctgacagagtgtcacgacccaaaacctatgggttgtgatggcgccggacacactgtcaagcaagccaatccctaaaccagttcaaacaacttcttgcttacactttcaaattcatgtctttttctgtatttataatcaaataataaagcaaatgctcgtaaactaaatacagcggataatccacttaatgcagtacaagaaataccaacacttttccagaacccggtgacagaagtacatgagtaatttctaagaatttatacaattatacaactcttgtccaagaatttaaattggacaaaggcaataaagacaaaagcgtagggacatagaagagagactctgccagctgcggaacgccacggaacaatgcagcctgagtaagtctccgaatcaatcactgcactatgagggtacctatgcaacaaaatgcacataaagtgtagcatgagtacatatacatatatatgtacccgaaatttctcgaagataaattctacccataactttactaactcaaatatacaatttgttacaattttcatgctcaaattcatggctaaaatcaaattttatcaattctaggttttcttccaaaaatcccaattgtcccacaatttttcatgtttaatctcatgtataaaccttgaattaacttgtaaatgagaaggaaccacttacctcttgatgcttgatgaaaatcaccctttgaaatcctccaaaatcgccccaaccaagtgaagtaatgaagaaaaatgagctaaacccgctaaaatatcattctgccagaatatttactcatcgcgatcgtggaaaatgcttcgcgatcgtggagaataattttccagcccaaaatttgctcttcgcgatcgcggaaagagcttcgcgatcacggagaacaattgcccagcctgcccggacagcctccagtagaatagtgataaccttttggcacacaactccaaatgacaaatggttaattgttccgaaacttagactcaaagatctacaattttcatgtgttggtcatcttccaattccttatagatgtctagatataatctggcaaagtcaacccatgtgccatacaaccttcttcttcatcttcccgtacaccctgtagtgtaacagacatatctctttgtacacaagtctaaatcatgaatgctttacttttctagaaactagacacaaagggatagaactttcatttttgtacaatctcataattccttatagattgtgagatatgagcctccgaagtcgagtcagtgcagcagaacatttactctacgcgatcgcgaaaggctttccgcgatcgcgattcactggcccccttctcacattttactcaccgcgatcgcgaccaattccccgcgatcgcgtagaacactgctgtagcaaaaaaccagcagttataaatggcctagaaattgtccgaaaccaccccgaaactcacccgagcccctcgggaccccgtgcgaacataccaacaagtctggaaacatatcacggacttagtcgaggcctcaaatcacatcaaacaacgccgaaaacacaaatcgcgcaagaattcaactttatgaactttgaaatttctaacttttacatccgatgccgaaacctatcaaatcatgtccgattgaccccaaattttgcacacaagtcacattcgacattacggacctgctccaacattcggaatcgcattccgaccgcgatatcaaaatttccacttccggtcggattttctcaaaaaccttcaaatttctatctttagccaaatgacttcaaaatgacctacggacctccgaattcacttccgaacgcgctcccaactccagaatcaccatacgaagctattcccagactcggaatcccaaacggacatctataacactgaaatgtcttgcaacccaaatttatggaattcttctaaaatactaacttccacaatacacgccgaaacgctcacgggttatccaaaacccgttgcagacatacgcccaagtccgaaatcatcatatgaacctgttgaaaccttcagatccacattctgaggtcgtttactcaaaattccagtcttactcaatttcttcaacttaaggcttctaaaatgagaattttcctttcaatttaactccgaacctcctgaatttcaactctgaccatacacacaagtcataatacccgaaatgaagttgttcatgactcccaactgttgaacgacgcgctggatctcaaaacgaattgtcgggtcgttacattctccccccttaaacagacgttcgtcctcgaacgtgccatgaactgctccagaattatctgaaatcactctttaacacctcgtgcacctgcccgtgctgccacaacccggttgaccatataagcttgatcaaatctgaaaatatcctcctttattcatacaataagctccgaacttagttctaacatcttaaattctctgccaggcctgtttctaacatttgaacatcgtatcaactaccacacaaggcactagaacacaactgcgtgcctttgctgaatcagcaccatacacttcatagttcatcatctgaccacaataacgctccctgaaccttaatagccagaattctgcaaacttgatgctctcaaggcaccttatcagatacattcatacattctgccataacgctaacgatatcaccacaacagaggagatgtgtaggaattcataaccaactgcagagttaactaaacattaaaatccttcctcctgactaagatcatcatcccattgcaaccaataatggtgattgtcctgtaatatacttgcatagtcctatcacaccgatcccaaatttataatctcgtctcacccagtacaaactgctcagataaccaatcaccccaggcataaccaacagtcccacacgatgccataatgcgccaataggccacaattcaaacacgacacataaggaaacgacatcaggaagggactacctgactcacgctataaacatgaactttcctcagagaaataggaagtaaaacacaagaataatcattataggagtcttgctcaacatcacactgttgcgacgcgcaacccgatccaaataacatacctgtggcagcgtgccacccgatcccctcataagatttacataaggaaatatacacggagctgaattgcttactattacaagtcactgaatatcggtcccaagcacgctaagtgcatattaccattttgaggagagtgatagagccatatgctacaaaactccagcacgactgaggtgcgatttataatctgaatcttaggagccatcctgctcacataatcttgtcactacgcggaaccttaacacattagaaattatcaagccgtttcacaactcacacgacacaatcacaatatcacatgaatttgacgaagacaggacaacacctgatatcccaatacccctccttgaggagtgccatactgaaatgaacacctctgactcgcatgaagcccaaaatcttgtttaagtccattcactcacttcaggccgattctgctcgcattgaactaggctgatagccttacctgggtctaaacaacccgcttgccttttcttatacacacgagaacaaccatcatagccgagataaaaaccccacaatccacaaccgactgatccgaacgccttccaggcataaattctcaattaagcaatattacactcctttatacttggtctaattcttcaaccaatcgggtgactacatgccacacttatgcaatcttcccgcggtcatgctcccacggccttccacacaaggtaacaagtatgaacatccataccaccgaccaccctaaggctgtaaaacaattcaaggacccataaccaggatacaaagcctctatcaccaaacaccgaacacagatgacactgaagacaatatcagtttattctaatcatttaaatcctttggtcttgctcctccgtgcatcatgacatccttgttaacaccgaaccgctacatactgctaactgcacctaacatgccaatatgaaatagcgcaagaattccatcatgattcctaagccgtattcgatgttaaaattccatcatgtagagtctttacttgcctcaattcctgataaccataacaacacacaagtgagctcccacaatcacaatacatgcaaatccttaagtagtggtctgaaccgccataacccttctgggacccgcctacacctgacaggccatagcacttgaatgcttccaactgaaatctattacgacgaccgacatgccccacacctatctgcacagaccgtacatgtactcaatcatgccgaaggaactgatcattgccgtacttgtgccatttcaaccatggctaaccaatctatcttcttttaatcatctttagttgcctcaaaggtaatagtaacttccttcaactcatagcatctcaaccctcactcatcccgagtgaccttgattcacgagaccatgctgcctaaattccgcaacccgtctcacaacctcctgataatctttctacaactcggagtttatttctttcactcctccaatactatcctgtgtgctgaaataacataggacactccaaccattttccttctcctaaaagattatgctgcaaaagctcgattctcaatcatacggctgcctgaaacccttaattaccacactttctaacctttgaattcactaggaccactgctgagagtcacccactctgactggccccgaatacaatcaactccaaggctcttctagcacatgaacatgctctcaatgaagaacgtgactgagtcacttcccttacaacttgcctatgccttaagcaaaaattctaaatcttccatagtctaaccctggtccaataggaccaagttcgtacacatttatcgaatgccatactcaattaccgctttactcctttctcttagttgtaacaagtttccaatacactgacaatccgcaatcccatgaggacacaaccttacaacccagctgcaggtggtgggactcctcgacttagcccgaatctactccctgcaccactccagacactgctaagatcttttcttctttgttgacatgaccttgctcaaccaattcatccaattcctctgaatttccccattagcatcccccaaatactcgaattctctagcactactcgcaccttctgcctcctaccgtctagccactaggatccctcgcagaaacttgccaaccccactaccactatcctactcacagaagataacccacctgtggaaactcagcaaccgacaccttccactgctctgtgaggcacactttctacgacatcgagacccccatcctaatcttgtcctcattcaccgacttcacttgtccgtccgctcctcagagacatccaccatgcgcgtgacaacaacttctgattccaagctatgttgcatccttcttcatcccaacaactcctctcggtggcatctaaccttccgccgaataaccaacatttcggtttaatcttgtggacctactccctgtccacaaaatttctcaaatcacttcaactcctccctaaggcaggcaaccgccttaccactgaactcataggctatactgccacttcttacttagttggactcattcctttaggcaagtacccgacttccttctctgatgcctggcatttagagatttagccgctacttgacacttttcacatggctcccttcatcgcatgcttctcagttgcgacctcaattcaatatcattctgtaggaaccatcagatcaccacgacttcaaactctctgatgataatctttcttgagctaccttcaatagaaatactcattcaataccttaaccaccgcacaccacggtctataacagttgcttcttcaacactgcttcacaacactctaacccaaggcaaccgaagaactatagcaccggcgaacttaacatgttctattcgatcaaacatcagtaccacaacacgggtgaatactccaccttgctatctaacaccaagcttcattacttttatcacccaagcctgaccatttatagttcaattgcctttcctccaccggaactaaaacactaaaatctcgaattcacactctaggaagaccccccttcaatccaatcatcaccctcatcctacgggcaaacattctaccatcatatcggcatcatgcgataaccagtcgggaacatcatcaccatctgagcatagcctcaaggctctcagaaacacaactactgagctgaaataacataatattcttctgcagggcgacaacaacagtccaatcgactatgcatggaaaacatcacacaccgtatctgtagccccattacaattcctcaaactctctattcatagcaagagcttcgcgacgtaagattgagtgggaagaaacataggcataagcttttaaaggaatcaaatcgcacgatgaggaatcaagaagggaagtactcctaacagccctgtagcctctcgaagataagtacagacgtctccgtaccaatccacaagactctactagacttgctcatgactcatgaaacctaggggaaccttgagatctgataccacgtcgtcacgacccaaaacctatgggttgtgatggcgccggacacactgtcaagcaagccaatcccagaactagttcaaacaacttcctgcttacactttcaaaatcatgtttttttctgcatttataatcaaataataaagcaaatgcaggtaaactaaatacggcggaaaatccacttaatgcagtacaagaaataccaacacttttccaaaacccggtgacagaagtacatgagcaatttctaagaatttatacaattatactactcttgtccgagaatttaaattggacaaaggtaataaatacaaaagcgtagggacatagaagggagactctgctagttgcggaatgccacggaacaatgcaacctgagtaagtctccgaatcaatcactgcactatgagggtacctgtgcaacaaaatgcacagaaagtgtagcatgagtacatatacatatatatatgtacccagtgagtatcccgtctaatctcgaagaagtagtgacgagaggtcgactcgatactcactaaggtccaacggtaatagtataaaaccggatataaggagagcagtagacatgtaaatagtgcaccacaattgtaaagagaatacagagtttccaaataaatatcgaaagcagtatcaacttccctgtcttttttcccatccacctgtcacgtcataaatcaagaattcatcaccaaacagtcatgcacacataagtgtaaagcaaccggctagagtcaggaggaagaatagctatgcactgccggggatcgaccggcccgtaccatgagtgcatgcttataatgtaatcatatcaagaagagttatgcactgccggggatcgaccggtccgtaccatgggtgcatgcttaccaagagtccaactatgcactgccggggatcgaccggcccgtaacgtaagtgcgtctatcaatgtaatcacaccgtatcacaatgtaacttcgtccatgcacttccggggatcgaccggcccgtaccataagtgcattctcaaataaatccttgtgcactgccggggatcgaccttcccgtaccgtaagtgcactataaatccgccgtggcgcacgacccgctcctgtaagagtgaaggaaaccatatgccgctcgcggaatgtaaattacgaggcgactatcatgcacacacaaatgtaaagttcaatttatcacaatccttctcaattattaagtaaatgaaagttcagggagacagtagtatatcaagcatgaatttaagcatatacttcaatttaaggcagaacacatggcatgatgtggtcctacactacccggacataacaatagtagtcgctacgtacggactctcgtcacaaggtacgcacgtagcccccaaatacaaacatacaacaaatagaacacctatggggacaatttccctcttacaaggttagaaaggagactcacctcgctccgaagatccatacccggcttccaagcctctacgacgactccaatggatgcgcaacgcccccaaactatccaaataacgataattcaatgaaagtatactctaatatttgctaaaaattcagattatataatttcccaactccgctcaaggaattgaccaaaatgccctcgggcccacgtgctcggattccgaaatttctcgaagataaattctacccataactttactaactcaaatatacaatttgttacaattttcatgctaaaattcatagcaaaaatcaaattttatcaattctaggttttcttccaaaaatcccaattgtcacacaattatttatgtttaatctcatgtataaaccttgaattaacttgtaaatgagaaggaaccacttacctcttgatgcttgatgaaaatcaccctttgaaatcctccaaaatcgccccaaccaagtgaagaaatgaagaaaaatgagctaaacccgctaaaatatcattctgcccatatatttactcatcgcgatcgaagaaagagcttcgcgatcgcggagaataattgcccagtctgcccggacaacctccagtagaatagtcataaagttttgcacacaactccaaatgacaaatggttaaatgttctaaaacctagactcaaagatctacaactttcatgtgttggtaaactttcaattccttatagattcctatatataatctggaaaagtcaacccatgtgcaacacaaccttcttcttcatcttcccgtacaccctgtagtgtaacagccatatctctttgtacacaaatacaaatcatgaatgctttacttttctaaaaactagacacaaagggctacaactttcatttttataccatctcaaaagtcgttgtagattgtgatatatgagcctccgaagtcgagtaagtgcagcagaatatttactctacgcgatcgagaaaggctttccgcgatcgcgattcactggcccgcttctcacattttactcaccgcgatcgcgaccaattccacgcgatcgcgtagaacactgctgtagccaaaaaccagcagttataaatggcctagaaatggtctgaaaccaccccaaaactcacccgagcccctcgggaccccgtccgaacataccaataagtctggaaacatatcacggacttagtcgaggcctcaaatcacatcaaacaacgccaaaaacacgaatcgcgcaagaattcaactttatgaactttgaaatttctaactttcacatccgatgcccgaacctatcaaatcacgtctgattgaccccaaattttgcacacaagtcacattcgacattacggacctgctccaactttcagaatcgcattccgaccccgatatcaaaatttccacttccggtcggatttgcccaaaaactttcaaatttctatctttagccaaatgacttcaaaatgacctacggacctccgaattcacttcccatcgcgctcccaactccagaatcaccatacgaagctattcccagactcgaaatcccaaacggacatctataacactgaaatgccttgcaacccaaatttatggaattcttctaaaatactaacttccacgccaaacgctcacgggttatccaaaacccgttgcggacatacgcccaagtccgaaatcatcatacgaacctgttggaaccttcagatccacattccgaggtcgtttactcaaaattccagtcttactcaatttcttcaacttaaggcttctgaaatgagaatttttctttcaatttaactctgaacctcctgaatttcaactttgacaatacacacaagtcataatacccgaaatgaagttattcatgacttccaactgctgaacgacgcgctggatctcaaaacgaccggtggggtcgttacacagagtctcccttctatgtacttgtatttatttttaaagtctttgtccaatttgttcatcgggcaagcattgtaaaattatataatttcttagaagttgctcatgtacttgtgtcaccgggttctggggatatgttaggatttattttcttcaactgaattgattttctaccgtatttaacttacgaagatttattcatttgactatgaaatgcaatgaaaggtaacgatttcgaaaatgtttaaaacaggagttttccaactagttaaggattggcttgcctgacagtggtgttcggcgccatcacgaccttatggaatttgggtcgtgacaaatagtcataggttatctcaacctacgtttttctatattttttatttttttctattataaattttaattaattttttatcttcatatttctagctaatatagaaaataaatatctatgggtggatcaatagagatataaatataaatataacgacaagtatacttataaatataaatttaaatgtagatatgtagattagatttatctaagatctatttagattaagtatatgatttattaaactgcttccatcaattatgttttcatttataattcaaatgtttaatgttgtcttaaaattgccaagtggcttctttttagcttgccacttggcttaactacatggttcactaccctcctttcaatataactattattagtacccgcgcgatgcgcggacaaatcatgtcaaattgcgatgtaggttgtttaaatcatgtgcaaataaccttaaagtattaaaccttttagataaaattatttaggatgagaatttaattaagaagcaggatatgaaattattattcaaatctcgtagtagacaacaaatttttttatttatatatttatagtaacctaaccccttgattgtagtacttgcatttgtaccgccgtcaatatttaagaatactaaacatgtcatattttgatctgtcttgttcaagcacattagatcatattttaacaaaattcttactatcactttacttttagtttaaagtaaaatatgtcttattcatcacatcatttttaggtcagttattttttctttttgttcttttcttatagtcattgtattgtttatcatttaatattattaactatcatataattttttattagcttataattaaattaatatcttgcttattatccttttaatagtatttcataaatataaattcggtgtagttttatgcttgtatcctcttactcaaaatattttaattatttaaatttatcagtaataatttaaatataattttattattttatttatttttaaattaatttaaagtataaatatccttacactacctctatttttttttaatacattctcttctctacaataaattataattagttttagattaatattttaccaataaccaatataataccacatttattttaaattgtaattttttattagtccaaaatattaatacataaattatttgattatcatgttccaaatgtattgagttctcttataatcaattttataatgcagttaaatttctttcttttttagctataagacataatttagtttttacttttcattagtaaaaccaatagtaaaaatttatgttgtatttttaaaaatttattaatcattgaaaaatgttttgttaattgtttgaacatgttatttgtaaatattgtagtaatacttttactgtcattttatatatttacgtaatattttcaaaaaaactcatctcaaattcaaataattcttatcgttctattttctaaattagaccgcattttcaaaaattatgctatgcgtccaaacttatacttactgcactcaattcagatattaatcatcgaaattaatttttcttaattatttgaacatattatatctgaatgttgtagttcactatcattttatttatttacataaattttctttcttttttagttataagataaaaacttaattttaattttaatttgtaaaattacctatattaaaaaatttaatttgtatttttaaaatttatttttcactttttttatttttcataaataaaacttcaatttcgtggaattatccagaatttgagcattctcatcatagttttaagaactttctaatctcaaattcaaatagtcttttcctttcatttctaatagtaaaattttaatattttgctatttttaatcttaatataaagtgttattacattttatatggcgttcattaacttttaactttatttaatatcattatcaactaattttatttaatctaaatatataactttttaattataaaataaatatttattttgttttaaaaatattgctcgaaattttaaataatttttaatttaataatatttttaaatattgtatatttactttattttattttctaaacttatgatttataaatgtccttacattatctctaatttatttttattgttcaatatttttaatttttgattttatctattagacttgaattatgtggactaatattatgactttcttatcataatataaaaatctttctcccctaaaatttaaataagttttgccctttttctctatgataaaaaatccaaatttttattttttctttatatgtgattttatattattcaatacctaatattattacattgtcatgtgaatttttattagcttgtttgaatttaataattatttttaccacactcatactaacataatattgtgataatccaaaaggtcatctcgtgtaattttaattaaaactgtattccgaggccctgaaagcctccttaaatctcacctcgatgtgcatgcgcaggccgggtgcgtagccgggaagcctttatgtgaaaaattgataaaatattgaatttataataattatttgaataaagttgactttggtcaatatttttggtaaacggacccggactcgtgatttgacggtcccggaggatccgtaggaaaatatgggacttgggcgtatgcccgaaatcgaatttcgaggtcccaagtctgagaaatgaattgttaatgaaaattattttctaaaaaatataaaggtttttgaaaatgagaattgatgtgaaacctgtgttatcgggcccgtattatggtttcggagcccggaataggttcaatatgttttatatgagttatctgtgaaatttggtaagaaatggacttagtttgacgtgattcggactaaaaatgaaaaatttggaagtttatgaagttttgagaatttctatagattttgaggtttaatttgatgtttatgatgttattttggtggtttaattactcgaataagtctgtaggatgttattgaggtcgtgtgtatatttagttttgagccgcgagggctcgggtgagtttctggtaggtgtcggagtgcaaaagtggtaaacaatctggtgtttaatgcattttctggtgtccaggtattttaccctatgcgaacgcactcaagggagtgcgaacgcatagggtaaagtggggtttgggggtcaaggtagaatttgtacagtgcgaacgcatcccttaggatgcgaacgcggagggtgagctggagaacactgtgcgaacgcgggggatagggtgcgaacgcacagtgttaacgtgggcctggggctaggtagtaaataccctgtgcgaacgcggcctctcaaccgcgaacgcacaggcctgagaaacataaacctgtgcgaacacaggcctccagccgcgaacgcactgctttaattcgcccagctaatttttagaaacccaaaacaacatacttgcgggatttaccccatttttctcaaccctccttcttccccacaccccacaggcaatttttgaagaacttttccaccatagcttcataggtaagtgatcttagctccatttttttccatattcaccaacaattaatagattctaggcctaaaatcatgaaattaaagggtagaaattgggattttgggtagagttagggctttttgaatttttggtaatttgacctcattttggggtcagatttcaaaacaaattgtatattccggctcgtgggggaatgggtgatcgggttttggtccgaacctcgtgtttggaccaagcgggaccgaggtcgaattttggaatttttgaaagaatgttgggaaatctataattaggctttgaaattgaattgttgagtaattattatgatgacccaaaaggtcatcctaaataattctagctaaatctgtgttccgagacccagaaagcctctgttaatctcaccttgatatgtgtgcgcagcccggacatgtagccgggaagcttctatgtgaaaatttgataaaaatggaattttgaatgaaataattgaataaagttgactttggtcaacatttttggcaaacggacccggacccgtgatgtgacggtctcggagggtccgtaggaaaatatgggacttgggcatatgctcggaatcgaattccgaggtcccaagcccgagaaatgattttttaaagaaaattgttttctgaaaataataaaggattttgaaaatgaattattatgtgaaaaccgtgttaccgggcccatattatggtttcgaagcctggaacatgtttattatatgttatgtgacttatctatgaaatttggtgtaaaacggactcgaaatgacgtgattcagattaaaaatgggaaatttagaagtttgtgaagtttgagaaatttttaagagttttaaggtttaattccgtgtttttgatgatatttcggtggtttaaatgcttgaacaagtccgtaggatgtattgggagacgtgtgtgtttttggttttgagacccgagggctcgggtgagtttcaggtagctaatggggtataaaaagataggaaaatctggtgtttctcctgtttctcgtgtcaggcctttccttcagtgcgatcgcatatgcatatccgcgatcgcacaacattaggttggtaggggcaaagtttactctatgcgatcgcatagagttgtccgcgatcgcatagtttcgtgcctgggggtagtctgttgcactatgcgatcgcatagcatactccgcgatcgcatagtgtattaggtgggtaagggcagctggaggaaaacaccctgtgcgatcgcattaacacttccgcgatcgcagtgcaaccagcgttggtctctatgcgatcgcattcctgcctccgcgatcgcataggctaattttgcctagttattttattaagtcccaaaacagacccattacgggatttcacccttttctcacttcctacttctttcccaaacccccatagacgaaattcaagctttccttcctccacagctccataggtatgtatatttaactccattttcttccactttccatcattaatcactagaatctaggcctaaaaacatgcaatcaaagtgggaaattgggtttttgggtagtgttaggtttttgggaaaattgggtgattcaacctcaatttggggtcgaatcttaaaactaatcatatatttgaactcatggggttatgggtgaacgggttttggtccgaacctcaagtttagaccacgtgggcccggggtcgaattttggaaattttgaaagaaaggtaggaattgtgtatttaggctatgagatggtgttattgagttattattgatacacttaaattaattatgcttagatattgtggttccagagttgaattcaaaaggaaaagcggtcttagagggttgattgctatactttggaccgaggtaagtgtcttgcctaactttggtgagggaatatgtattaattactatgtgctaagtgcatatcatggtcattgcataggtgaggtgacgagtacctatgcaatgtgtgtcaagcatgcccgtgagtctattttgatagaaattgcagtatttcgtccatgtttagtatattatgagatttgtctttacttggtaatttattcttgattgaaagtattggctattgagtttgagaagtattgatacgaatgataacacaagtgtagagttcgtgattgaggtaattggatatagctgcgacccttgccgggcatttattgagttattgaattgatgtttttcccttgctgggtgtttcggaactgcttatttccactatgctatactccttgcaaatttatctgctgttgtttggtgaggaagagtgtaaagcacgaagggtgatgccgtgccatgaaatttgtttacattgcatagtgaggaagattgtaaagcacgaagggtgatgccgtgccatgattcatatttattataagcacgaaggttaatgtcgtgccatgattttatttattataagtacgaaggttaatgccgtgccatgatacatcgtatatttcattgtgaggaagagagtaaaatcacgaagggtgatgccgtgccatgatatttgattacattgcattgtgaggaagagagtaaaagcacgaagggtgatgccgtgccattgtttccttttctaacatttatacttgtttcgttgtcgattttgttggattgtttcccgggttcacttctatctgtcacttagactgctttacttcacttgtttttccccttttctgctcccgtatcctttacttgcttgcttatcccttgtcttgtttttttcctgttaccagttattccagcttcagcagctgagggagcggctatgtccgcagacgctttatggaggttagacaggttcaccaagctcttcacaactacattcactggcgctccttctgaggacccccaggactacttggatagttgctatgaggttctacggaacatgggcatcgtggagtccaacggggttgattttgctacttttcgactgtctagtgcagccaagacttggtggagagactattgcctagccagaccagctgggtctgtacagttgacttggtcccagttcacagaggtattcttggggaaattccttcccatcacacagagagaagagctacggaggcagtttgagcgtctccaacagggttccatgaccgttactcagtacgagaccaggttcatcgctctagccaggcatgcattgatgatactccccactgatcgggagagagttcgaaggtttattgaggaattgtcccagcctatacgactccatatggccagggagtcgactactgatatttcattccaggatgcggccgatttagccaagaggattgagatgattttgtcacaagggggtggtcaagggggtgacaagaggccccgtcattttggtagatttagtggagcctcgtctggaggcagggattatttcagtaggggtcatccaccccgaccattttagttagcacttcaggtatcccctcgtgcaccgccagttcatgttagcacaccaccagcccctatcagtgcacagccgctctagagtttccagggtggatatcagggtcatcagggccagtttccgagtcatcagccacagcagcagagatcttgttatagttgtggtagcccggggcacattgccagatattgcccccgagcttcgagtggaccccactatcagggttcccgtgccgtggttcccacagcaggtgcacccttaccccctcatccagctagaggtggtggtcgaggtgccagaggtggtggtcaggttcatagaggtggagcacataccgcgaggggtagaagccaggttgcagcaggtagacccagggatgttcagattggaggggctcagccccggtgttatgcttttcctgctagtcctgatgctgaggcttcggatgcagttattacaggtacggtttcagtttgcagccgagaggcttcggcgttatttgatccgggttctacattctcctatgtgtcttcatattttgccccttatttgagtatgccttgtgattctttgagtactgttgtacatatgtctacaccggtgggtggttctatagtggtagattgagtctaccgtgcttgcgcaatagttatttgtggtctggagactcaggttgatcttttgcttcttgatatggttgactttgatgttatattggttatctccctataatgctattttggacggtcatgccaagacagtgaccttagccttgccaggagtacctcgtttagagtggagagggactcctagtcattcttctggtagagttgtttcttatataaaggctcggcgcatggtcgagaagggttgcttggcctatttggcctatgttcgtgattctagtgctgaggttcctcctatggagtccgtgcccgtggttcacgagtttccaggggtattccctgctgacctgccgggtatgccacccgacagggatattgacttttgtattgagttggctgagggcactcagcccatttctattcccccgtatcgtatggctgcactagaattgaaagaattaaaggaacaattgcaggatttgttggataaaggcttcaataggcctagtgtttctccttggggtgctccagtattgttcgtgtagaagaaagacggctcaatgaggatgtgtattgagtaccggcaattgaataaggttactatcaagaacaagtatcctttgccgaggattgatgacttatttgatcagcttcagggtgctacggtattctctcagatagacttgagatctggttatcatcagttgaggatcagggcatctgatgtgcccaggacggcttttcgcactcgttatgggcactatgagtttttggtcatgccgtttgggttgactaatgcccccgttgcttttatggagttgaagaattaggtattcaggccttatttggactcgttcgtcattgttttcaatgatgatattttgatatactctcgcagtcgagaggagcatgaacagcaccttagagtcgtcctccaaactctgaaggatagtcagttatatgccaaattttctaagtgtgagttctggttgagttcagtggcatttctgggccatgttgtgtcggcagaaggtattcaggtggatccgaagaaggtttcagcagttagagattggcctaggcccacttcagccatagagattcggagtttcttgggcctagcaggctattatcgccggtttgtggaggggttttcgtctatagcagcccctatgaccaagttgacgcagaagagtgtccagttcagatggtctgaggagtgtgaagcgagcattcagaagctcaagacagcattgaccacagcacccagtgttggtattatcctcaggttcaggttcttataccgtgtattgtgatgcttcgcgggtaggacttggtgcggtattgatgcaggagggaaaggttatagcctacgcatctcgccagttgaagattcatgaaaagaactatccagtccatgatctggaacttgcagctattgttcatgccttgaagatttggaggcactatttatatggggtgccgtgtgaggtgttcactgatcataagagtttgcaatacttgtttaagcaaaaggagttgaatatgaggcagaggaggtggttagagttgctgaaagattatgacattaccatactttatcatccggggaaggccaatgtggtggccgatgctttgagccggaagtcagtcagcatgggtagtttggcttacttatcagttggagagcgaactttggctttggatgttcaggcgttagccaatcgatttgtcaaattggaggtttctgaaggtggcagtgttttggctcataccgtcgctcgttcttcattatatgatcgcattcacgccaggtagtatgatgatcatcatttatgtgctcttagagatgcggttcggcacggacgtgccaagcaggtcacagttgatactgagggagttttgagattgcagggacgtatatgtgttcctgatgttgatggccttcgtgagttaatattgtaggaggcccatagttcccggtattccattcatccgggcgccgcaaagatgtaccaggacttgcggcagcattattggtggcgtagaatgaagaaggatattgtggcctatgtggctcggtgcttgaattgtcagcaggttaaatatgagcaccagagaccgggtggtttgatgcagcagattcagcttcccgagtggaagtgggagcgtatcacgatggattttgtagttggacttccacggactcggaggatggttgatgcagtatgggttgtggtggataggctgaccaagtcagcacatttcattccggtggcagtttcatcttcagcggagaagttagctcagatctacatgagagagattgtcaggttgcacggtgtgcccttatctatcatatcagaccgaggtacttagcttacctcccatttctggagggtattccagcgagagttgggtacacagatcgagttgagcacaacatttcatcctcagacggacggacagtctgagcgcaccattcatattttggaggatatgttgcgagcttgtgttattgattttggtggatcatgggatcggttcttgcctttagtagagtttgcctacaacaacagttaccagtcgagcattcagatggctccgtatgaggcgttgtatggtaggcgatgtcggtctccaatcggatggtttgagcccgatgaggctagattattgggttctgagttagtccaagatgccttggataaagtgaagattattcaggataggcttcgtacagctcagtccaggcaaaagagctatgcagatcgtagagttcgagatttggcttttatggtaggagaccaggtgttcctccgagtgtcgcctatgaaaggcgtgatgagattcggaaagaagggcaagttgagccctaggtatattggtccatttgaaattttagagaaagtaggagaggtggcctacaaacttgccttgccaccacatttatcagcaatgcatccagtttttcatgtatctatgctccggaggtatattgaagatccgtctcatgttcttgatttcagcggtgtccagttggacaaggacctgacttatgaggaggagccagtagccatattagataggcaggttcgccagttgaggtcgaagagttatccttcggtccgtgttcagtggagaggtcagcctgccgaggcagctacttgggagtccgagtccgatatgaggagtcgttacctatcttttctcagagtcaggtatttttctatgtccgttcgaggacgaatgtttgttttagaggtggagattgtgatgacccaaaaggtcatcctaagtaattctagctaaatctgtgtttcgaggcccagaaagcctccgttaatctcacctcgatatgcatgcacaacccggacatgtagccgggaagcttctatgtgaaaatttgataaaatggaattttgaatgaaataattaaataaagttgactttggccaacatttttggcaaacggacccggacccgtgatgtgacggtcccagagggtccgtaggaaaatattggacttgggcatatgctcggaatcgaattccgaggtcccaagcccgagaaatttatttttaaagaaaattgttttctgaaaataataaaggattttgaaaatgaattattatgtgaaaaccatgttaccgggcccgtgtttggtttcgaagcccggaacatgtttattatatgttatgtgacttatctgtgaaatttggtgtaaaacggacttgaaatgacgtgattcagattaaaaatgggaaatttagaagtttgtgaagtttgagaaatttttaagagttttgaggtttaattccgtgtttttgatgatattttggtggtttaaatgcttgaacaagtccgtaggatgtattgagaggcttgtgtgtttttggttttgagacccgagggctccggtgagtttcaggtagctaacggggtgtaaaaaggtaggaaaatttggtgtttctcctgtttctggtgtcaggcctttccttcagtgcgatcgcatatgcatatccgcgatcgcacaacattaggttggtaggggaaaagtttactctatgtgatcgcatagagttgtccgcgatcgcatagtttcgtgcctgggggtagtctgttgcactatgcgatcgcatagcatactccgcgatcgcatagtgtattaggtgggtaagggcagttggaggaaacaccatgtgcgatcgcattaacccttccgcgatcgcagtgcacccaacgttggtctctatgcgatcacattcctgcctccgcgatcgcataggctaattttgcccagttattttattaagtcccaaaacagacccattacgggatttcaccctttctcacttcctccttcttccccaaacccccatagacgaaattcaagctttccttcctccacagctccataggtatgtatatttaactccattttcttccactttccatcattaatcactagaatctaggcctaaaaacatgcaatcaaagtgggaaattgggtttttgggtagtgttaggtttttgggaaaattgggtgattcaacctcaatttggggtcgaatcttaaaactaatcatatatttgaactcatgggattatgggtgaacgagttttggtctgaacctcgagtttagaccacgtgggcccgggatcgaattttggaaaattttaaagaaaggtgggaattgtgtatttaggctatgggatggtgttattgagttattattgatacacttaaattaattatgcttagatattgtggttccggagttgaattcaaaaggaaaagcggtcttagagggttgattgctatactttggaccgaggtaagtgtcttgcctaactttggtgagggaatatgtattatttgctatgtgctaagtgaatatcatggtcattgcattggtgaggtgacgagtacctatgcaatgtgtgtcaagcatgcccgtgagtctattttgatagaaattgcagtatttcgtccatgtttagtatattatgagatttgtctttacttggtaatttattcttgattgaaagtattggctattgagtttgagaagtattgatacgaatgataacacaagtgtagagttcgtgattgagttaattggatatagttgcgacccttgccgggcatttattgagttattgaattgatgtttttcccttgctgggtgtttcggaactgcttatttccactatgctgtactccttgccaatttatctgctgttgtttggtgaggaagagtgtaaagcacgaagggtgatgtcgtgccatgaaattgttttacattgcatagtgaggaagagtgtaaagcacgaagggtgatgtcgtgccatgattcatatttattataagcacgaaggttaatgttgtgccatgattttatttattataagcacgaaggttaatgtcgtgccatgatacatcgtatatttcattgtgaggaagagagtaaaagcacgaggagtgatgctgtgccatgatatttgattacattgcattgtgaggaagagagtaaaagcacgaagggtgatgtcgtgccattgtttccttttctaacatttatacttgtttcgttgtcgattttgttggattgtttcccaggttcacttctatatgtcaattagactggtttacttcacttgtttttccccttttctgctcccgtatcccttacttgcttgcttatcccttgtcttgtttttttcttgttacctgctgtagaataggacaggctatcgttattgtcgagtctagcctcgtcactacttcggctgaggttaggctcggcacttactcagtacatggggtcggttgtactgatgctacacttcacttcttaatgttgtgcagatcacgcatctggacccagtggaccgcattgagggagtcaccttcagtccacccagagcttcaaggtatacccgctggcgttcgtgggccttggtgtctctcctgcttttggattcctcattgtcttactttttctcctagtttcaagacaattgtatatttcttttcagacgttgtatttagtactcagttagatagttcgtgaggttgtgacaccccggttttgagattgttcgttgtagatgtcttatcagtttattttgagtttttgagataatattattatttttctactgtgaaacaattgaagtgatttggaatgttcagtaaagttttgagagttatagtgtgggatgtgttttttgaaaaaggttggacattaatgaattcaggttattccagtaaatactgttacgtggcgttaataaggcaataatgttgtatacattggcttgtctagcgggttcaatgttagacgcagtcacggcctgaaaggtgggatttggggtgtgacaattattgatgttattaagtcaattatgtctagatacggttgtttcggagtcaaattctagaggaaaagcggtgttagaggcttgatttgcattcttggagtccaggtaagtgtttggcctaactttagcttgagggaataggtgttgagtcgtatgtgctacttgtttttatcatgttcaatgtataggtgaggtgacgagtacctatatattgttgtcaagcatgcccgtgagtcgatttcgatgtattacgtgtgtttcttcgatattcattatgttgtgaaaatttccttttgaagttattcaattgttgagaaatacttgatagaggacaggtaataagttgtttccagttgaggattgtttttcattaagttatatacttggatgagattggttatagccgagtctcttgccgggacggtagtatttcggttgttgttcccttgccgggttattatgaatcatgtttcctgctattgatttccttgccaagttgttattttgttattgtatgggtgaggaagagtgtaaagcacgaagggtgatgccgtatattcattccattcattgcattgtgagtaagagagtaaaagcacgaagggtgatgtcgtgccatgattttacatttaaaaggacgaaggaacatgtcgtgcccttttattaatttattgcattgtaaggacgagagtaaaagcacgaagggtgatgtcgtgtacttgttttggtaaggatgagagtaaagcacgaagggtgatgccgtgtacatatttgtttgtgttgttacttcctgttgacttttactcttctatattgttgccttgctcagtgattcattactgttctctcttgttttccccattatttgtcccctgtcttgccgtacctaatcgtttatttcctgttatttccctgttatatattgtagaactgtatatgtaatttgttgttgtcatgtctagcctcgtcactacttcgccgaggttaggctcggcacttactcagtacatggggtcgattgtactgatgctacacctgcacttttttatgttgtgcagattacggagccggacccagtggacactgatagagggagtatccttcagtccacacaggcgacaccgaggtagttccgcacacgttcgtgggccatggcgtcaccatctatcttttcctttctgtcttatttctatttccagataattgtacttgttcatttcagactcttgttgtagaaatcttagactgtccgtgagatttgtgacatcagttctgggggtttattctgatgacccaaaatgtcatcctaagttaatcattctaaatctgtatatcgaggatccgaaagcctccgttaatctcacctcgatatgcgtgcacagcccgggcgtgtagccgggaaacttctatgtaaaaatttgatgaaaattgaatttttgtaacaattaaatgaataaagttgactttggtcaacatttttggtaaacggaaccggacccgtgattcgacggtcccggagggtccgtaggaaaatatgggacttgggcgtatgcccggaatcgaattccgaggtcccaagccagagaaatgaatttttaaagaaaattgttttctgcaaataataaaggtttttgaaaatgaacgttgatgtgaaaaccgtgttaccgggcccgtattattgttccggtgcccggaacaggtttaatgtatcttatgtgacttatcagtgaaatttggtgtaaaacggacttgaaatgacgtgtttcggatcaaaattggaaaacaattaagctttatgaagttttaagaaattctaagagttttgaggtttaattcgatgattttgatgatatcttggtgatttaaatgcttgaataggtctgtaggatgttttgggagtcgtgtgtgttttttgttttgagacccgaggctcgggtgagtttcgggtagctaacagggtgagttaaagtgtaagaatctggtgttttggactggtttctggtgtctgatgtttccttcagtgcgatcgcactagagtccatgcgatcgcacagagtaattgtggggtctggggtcaaaatgttcagtgcgaacgcacctcaatgggcgcgatcatggagggtctaggattagtactgtgcgaacccaggtgggattttgcgaacgcacataggttagcatgggggcctggggccgggtagaatttccctgtgtgatcgcagagcttaagtgaacctgaatctatgcgatcgcacctcatgttccgcgaacgcatagagtaattcttcccagctatttttaatacccaaaaacagacccattacgggattcttcatatttttcaccctctccttcttctccacaaccccttagccccattcttgaatagctccatcactacatcctcagaggtaatcaatcctaactccattctccttccattttcgtccctaatcactagaatctaggtcttaaatcatgaaatcaaagtagaaattaggggttttggatagagttaggtttttgggaattttgggtaattcaaccctaatttggggtcgaatttcaaaacaaattatatattctaactcgtgggggtatgggtgatcgggttttggtccgagcctcgtgtttggaccaagcgggcctggggtcgaattttgaaaaataagaattgtgtatttaagctatgggattgtgttattgagttattattgatatacttaagttaattatgcctagatattgttgttccggagttgaattcaaaaggaaaggcggtgttagagggttgattgctatattttggacgcgaggcaagtgtcctgccaaactttggtgagggaataggtattgtatgctatgtgctaagtgttcatcatgttcaatgcataggtaaggtgacgagtacctatgcattgtgtgtccagcatgcccgtgagtctattttgataaaaatcttgttattacttccatgttcgttatattatgaacttgtctctacttggaagccgttgttgttggaaatcttggttgatgaacttatgatatatcggttcgattgaaaacccaactgttaatgatatatttgaaatgattggttgtagctgagacccttgccgggcacttgttgtgaaattgattgatgttttccccctgccgggtgatattgaaatgtatttccactatgatgtactccttgccattatatctgtcattgtttgacgagaaagagtgtaaagcacgaagggtgatgccgtgccacgatatttgattacattgcatggtgagagagagaaagtaaagcacgaagggtgatgtcgtgccatcatttacattgattataagcacgaaggttaatgccgtgccataatttacattgattataagcacgaaggttaatgtcgtgccatgatttacattgattataagcatgaaggttaatgccgtgacatgatttatattgccttacattgtacattgcattgtgaggaagagattaaaagcacgaagggtgatgttgtgccatgatttatactatttcacattatacatcgcattgtgaggaagagagtaaaagcacgaagggtgatgctgtgccattatttacatttctggatttatactggtttcgttagctattgtgttaaattgccttccttgtttacttctatatgcctaagttactgctttatctcaattatttccccgttatctacccccatatcccatgcttaactgttacttcctgctcctttccatgttatgtgttgtagaatatgacaggttatcgattgttgtcaagtctagcctcgtcactacttcggccgaggttaggctcagtgcttactcagtacatggggtcggttgtactgatgctacactgcacttcttaatgttgtgtagaccccgcatccggacctagtggaccgcattgagggagtcaccttcagtccacccagagcttcaaggtatacccgctggcgttcgtgggccttggtgtctctcctgcctttggattccttattgtcttatcttttccccccagtttcaagacaatgatgtatttcttttcagactatgtatttagcactctgtttagacaattcgtaagttgtgacaccccggttttgggctgatgcgacgttatgtattttactatttcactttgcattttcggatttctattacatttccgctgttaaaagtctaaagtgtttcgttatttctgttaagatttttgaaggtattcccattactactgttgaattgggttgcaaatgttagattacatgtgcacgttggcttgtctagcgggttcaacgttagacgcagtcacggcctgaaggtgggatttcgggtcgtgacaagttggtatcagagctctaggtttcttacgtctcacaactcacggacaacttggtagagtctgagggatcggtacagagacgtctgtacttataccctataggctgcaaagttaggataactccacatttcttcatctctgtcgtgcgatatgaattctaagtactgattgagtttccattctactctctcgcagatggcgaggacgcgtgcttcccttggttccgctcagcagcctgacactcttgctatatctcctacgaggggtcgaggtcgaggacgaggccgtgctagaggccgaggccgggctcagcctagagtagcagccctagtggaggaccctcaggtcgagtctgacgaggaggtcccagttccggcagtcccagttggaccagcgcaggtcccagaggggttcatagttaccccagtgcttcaggacgctcttgtccgtctggtaggacttatggagagtgtggctcaggccggccttcttcctactgcaccagctggttctcaggctgggggagggacccagactcctgttattcataccccagagcaggttgccactcagtttcagactcctgcacctcagacagctggagtagcttagccgggtattgtggtaccgacaaccgagggtgcagctatgtcagcagatgctctatggagactagatcggttcaccaagttattcactactacttttactggtgcgccgtcagaggatccacaagattacttggacaactgtcatgaggttcttcggaacatgggcatagtggattccaatggagttgacttcgctacttttcgactatccggcgcagccaagacttggtggagggactactgcttagccagaccagttgggtctgcacctttgacctgagctcagttcacagaggtatttttggggaagttccttcccattactcagcgagaggatcttaggaggtagtttgagcgcctccagcagggatctatgtctgttactcagtacgataccaggttcatcgctctagcaaggcatgcattgatgatactccccactgatcgggagagagttcggaggttcattgagggattggcccagcctatactactccagatgggcagggagtcgagtactgatatttcgttccagatgcggtcgatgtggccaggaggattgagatgattttgtcacagggaggtggtcagggggctgacaagaggccccatcattttggtagattcagtagagcctcatctgaggcagggattctttcagcaggggtcatccaccccgaccttttcagtcagcacttcaggtatctccccgtgcaccaccagctcctgttagtgcaccaccagcatctatccgtgcacagccacttcagagttaccagggtggttatcagggccgtgagggccagttcccgagttatcagccacagtagcaaagatcttgttatagttgtggtagcccgggcacattgccagacattgcccccgagcttcgagtggaccccagtatcagggttcccgtgccttgttcccgcagcaggtgcacccttaccccctcagcaagctaggggtggtggtcgaggtgccagaggtggtggtcaggctcatagaggtggagcacatgccatgagaggtagaggtcagcccgtagcaggtagacccagagatgtgcaggttggaggggctcagccccggtgtcatgctttcctgctcgtcctgatgccgagtcttctgacgcagttattacaggtacgatttcagtttgcaatcgagaggcttcagtgttatttgatccgggttctacattcttctatgtgtcttcatatttagccccttacttgagaatgccccgtgattccttgagtactgctgtacatgtgtctacaccagtgggtgattctatagtggtagatcgagtctatcgtgcttgcatagtagttattggtggtctcgagactcaggttgatcttttccttcttgatatggttgactttgatgttatattggggatggattggttatctccctatcatgctatcttggattgtcatgccatgacagtgaccttagccttgccaggagtacctcggttagagtggagggggactcctagtcattcttcgggtagggttatttcttagatgaaggctcggcgcatggtcgagaagggttgtttggcttatttggcctatgttcgtgattctagtgctgaggttccttctatagagtcagtgcccgtggttcgtgagtttccagaggtattccctgctgacctgccgggtatgccacccgacagggatattgacttttgtattgagttagctgagggcactcagcccatttatattcccccgtatcgtatggctccgccagagttgaaggaattaaaggaacaattacaagatttgttggataaaggctttatcaggccaagtgtttctccttgggggtgctcccgtgttgttcgtgaagaagaaagatggctcaaggaggatgtgtattgactaccggcagttgaataaagttactatcaagaacaagtatcctttgccaaggattgatgacttatttgatcagcttcagggtgctacattattctctaagatagacttgaggtctggttatcatcaattgagcatcagggcgtctgatgtgcctaagacggcttttcgcactcgttatgggcattatgagtttttggtcatgtcgtttgggttgactaatgcccccgctgcttttatggagttgatgaaccgactattcaagccttatttggactcgttcattattgttttcattgatgatattttgatatactctcacaaccgagaggagcatgagcagcaccttagaatcgtcctccagactccgagggacaggcagttgtatgccaagttttctaagtgtgagttctggttgagttctgtggcattcttgggccacgttgtatcagcagagggcattcagatggatccgaagaaagtttcagcagttagagattggcctaggcccacttcagccacagagattcggagtttcttgggcctcgtaggctattatcgctggttcgtggaggggttttcatttatagcagcccctatgaccaagttgatgcagaaaagtgttcagtttagatggtctgagaagtgtgaagcgagctttcagaagctcaagacagccttgaccacgacaccagtgttagtgttgcccacaggtacaaggctttataccgtgtattgcaatgcttcgcgggttgggcttcgtgcagtgttgatgcaggatgggaaggttatagcctatgcttctcgtcagttgaagattcatgagaagaactatccagtccatgatttggagcttgcggctattgttcacgctttgaagatttggaggcactatatgtacggagtgccatgtgaggtgttcacggaccataagagcttgcagtatctattcagacagaaggagttgaacatgaggcaaaggagatggttagagtttctgaaggattatgatatgaccattctttatcatctggggaaggccaatgtggtagccgatgctttgagccggaagtcagccagtataggcagtctagcttatttatcagtcggggagagacctcttgagttggatgttcatgccttagccaaccgatttgtgagattagaggtttctgagactggcagtatgttggcccatatcgtagcccgttcttccttgtatgatcgtattcgggccaggcagtatgatgctcattacttatgcactcttagagatatggttcggcacagaggtgccaagaaggtcacagtcgatgctgagggagttttgagattgtagggtcgtatttgtgtacccgatgttgatggcattcgtgagttgatattgcaggaggcccatagttcctggtattccattcatccgggcgccgcaaagatgtactaggacttgcggcaacattattggtggcgtagaatgaagaaggatattgtggcttatgtagctctgtgtttgaattgtcagcaggttaagtatgagcaccagagacccggtggattgatgcagcagattcagcttcccgagtggaagtgggagcgtatcacgatggattttgtagtagggcttccacggactcagaggatggttgatgcagtatgggttgttgtggataagctgaccaagtaagcacatgtcattcctgtgttagtttcatattcggcggagaagttggcaaagatctacatgagaaagattgtcagattgcatggcgttcccttatctattatatcagaccgaggtagtcaatttacttcccatttctggagagtatttcagcagttgggcacacagattgagttgagcacagcatttcatcctcagacggacggacagtccgagcgtactatttagatttttgaggatatgttgcgggcatgcgttattgattttggtggttcattggaccagttcttacctttagcagagtttgcctacaacaccagttaccagtcgagcatccagatggctccgtatgaggcgttgaatggtaggcgatgtcggtctccagtcagatggtttgagcccggagaggctaggttattgggttctgagttagtccaggatgccttggataaggtgaagattattcaggataggcttcgtacaactcagtccaggcaaaagagttatgcagatcgtagagttcgagatttggctttcatggtaggagaccaggtgttccttcgagtgtcgcctatgaagggcgtgatgagattcggaaagaagggcaagttgagccctaggtatattggtctatttgagattttggacaaggtaggagaggtggcctacagacttgccttgccatttatcagtcgtgcatccagtgtttcacgtatctatgctccggaggtacattgcagatccttcgcatgttcttgacttcagcggtgtccatttggacaaggatttgacttatgaggaggagtcggtagctatattagctaggcaggttcgtcagttgagatcgaagagttatccttcggttcgtgttcggtggagaggtcagcctgccgaggcagctacttgggagttcgagtccgatatgaagagtcgttatccccatcttttctcagactcaggtacctttctatgtccgttcgaagacgaacgtttgttttagaggtggagattgtgatgacccaaaaggtcatcctaagttaatcccgctaaatctgtgtcccgaggctccaaaagcctctgttaatctcacctcgatatgcctgcgcagcccgggcgtgtagctgggaaacttctatgtgaaaatttgatgaaaatggaatttttgtaacaattaaattaataaagttgactttggtcaacatttttggtaaacggacccggacccgtgattcgacggtcccggagggtccgtaggaaaatatgggacttaggcgtatgcccggaatcgaattccgaggtccaaagcccgagaaatgaatttttaaagaaaattattttctaaaaataataaaggcttttgaaaatgaacgttgatgtgaaaaccatgttaccgggcacgtattatggttctggagcccagaacaggtttaatatatgttatgtgacttatctgtaaaatttggtgtaaaacggacttgaaatgacgtgtttcggatcaaaatttaaaaaaaaattaagctttatgaacttttaagaaaattctaagagttttgaggtttaattcgataattttgatgatatcttggtgatttaaatgcctcgtgtttggaccaagcgggcccggggtcgaattttggaaaataagaattgtgtatttaagctatgggattgtgttattgagttattattgatatacttaagttaattatgcctagatattgttgttctggagatgaattcaaaaggaaaggcggtgttagagggttgattgctatattttggacgcgaggtaagtgtattgcctaactttcgtgaggaaataggtattgtatgctatgtgctaagtgttcatcatgttcaatgcataagtaaggtgacgagtacctatgcattgtgtgtccagcatgcccgtgagtctattttgataaaaatcttgttattacttccatattcgttatattatgaacttgtctctacttggaagccgttgttgttggaaatcttggttgatgaacttatgatatatcggttcgattgaaaacccaactgttaaggatatatttgaaatgattagttatagctgagacccttgtcgggcacttgttgtgaaattgattgatgttttccccctgcggggtgatattgaaatgtattttatgatgtactccttgacattatatatgtcattgtttggtgaggaagagtgtaaagcacaaagggtgatgccgtgccatgatatttgattccattgcatggtgagagagagaaagtaaagcacgaagggtgatgccgtgccatgatttacattgattataagcacgaaggttaatgtcgtgccatgatttacattgattataagcacgaaggttaatgtcgtgccttgatttacattgattataagcacgaaggttaatgtcgtgccatgatttatattgccttacattgtacattgcattgtgaggaagagagtaaaagcacgaagggtgatgccgtgccatgatttatactatttcacattatacatcgcattgtgaggcagagagtaaaagcacgaagggtgatgtcgtgccattatttacatttctggatttatactggttttgttagctattgtgttaaattgccttccttgtttacttctatatgcctaagttactgctttatctcaattatttccccgttatctacccccgtatcccatgcttaactgttacttcatgcttctttccatgttatgtgttgtagaataggacatgttatcgattgttgtcaagtctagcctcgttactacttcggccgaggttaggctcggcacttactcagtacatggggtcggttgtactgatgctacactgcacttcttaatgttgtgcagaccccgcatccagtggaccgcattgagggagtcatcttcagtccacccagagcttcaaggtatacccgctggcgttcatgggccttggtgtctctcctgcctttggattccttattgtcttatattttcccccagtttcaagacaatgatgtatttcttttcagactatgtatttagcactctgtttagacagttcgtgagttgtgacaccccggttttgggctgaagctacgttatgtattttactatttcactttgcatttttggatttctattacatttccgctgttgaaattctacagtgtttcgttattatcaaccgcacatgttagattacatgtgcacgttggcttgtctagcgggttcaacgttagacgcagtcatggcctgaatgtgggatttcgggtcgtgacatttatgtacggaaatttcgtaatatttattacattaagttgataaactcgtagcttccgcattcttatttaattgttcatgcttattgttttcctttttgatgtcataaatgaagaaaatagtaaattttaccaaaaacgttgcttgtctagcgggtacaacgttagacgccatcacggcctgaaggtgggatttcgggtcgtgacaaatagataaaaatttaaaaactttctcatttcaaattcaaataattcttaaaggaattttcaaaaacaactattgtttagtggctattaacttcctatagctaccatatacataattacttccaatagctactattcagttattacaatagtgtattcgcactgatgtatttatgaatacagcaacaaaaagtacctaaaattagggtagtccagttgtacgcgcatgtattcgcgccatgtattcgcgccatgtattcatgaatacaacaccaaaaatgcctaaaatcagggcaatccagctgtatgcgcatgtattcgcgttggttgtattcatgaatacaacagtaaaaagtacctaaataaaggtagcccagctgtatgcgcatgtattcgcaccatgtattcatgaatacagtaacgacaatcaccttaaaataggtgtgtccagttgtctaagagagaagaaaaacataaatagcgtatttcatgtctcaatggtagtgtataccataaatacttattttgctacaacatataaaaggtagctatagaaaataatattttaaaataattttgatttataataaatagggtgtatacctttgctataggaggtaaaatttcctaatttttatcactctattttcttagttggaccatattttcaaaaaattatgttatgcctgcaaacttaaataaattaaactcaattcaaatattaatcatagaaaaatattttcttaattgtttgaacacattatatctaaatgttatagtaatatttacgtataaaatatttgttttcatgatttatcaacattaatatgactttattattcttgttaacaaaatatcttttatagattattaaattttcctcttaccttataaataatttgtatactttatgtaagatcttagtttgctgcttgaatttatttaatttttaaactcaataaaattttaatatcttaagtaaattttagttttattttatattttaacttactccaaagtataaatagtcacaggttctctcaatttacgtctttatatattcttttgtattttttctatcatagtttttaattgatttttcacctccatatttctagctaatattgatgaaaatctatgagtggatcaatatatatatatatatatatatatatatatatgatttgtctaagatctatttagattatgtatgagattcattaaactacttccattaattatgtttccatttataatttctaattattattgttgtcctaaaattgccaagtggcttcattctagctttacattgcaaactactctccttttagtataactagtattagtacacgtgcggtgcacagacacaaatcatgttaaattgtgatgttttttaatcatgtgcaaattaccttaaaatataaacctctcagataaaagttatataccatatgtttttttttagtaatccactaggcagggcctagggctagtttttatatataaagcaaagtaagacaaaatccgaagttatctcacaaggagtgagatgataatgtgtgataactatacataggatcctattaccaatattgagcttaagaagcccaatattagtatcacaattgagtctagcaaataaaatgattgaactacatttgaaaactagcctactataatataaagatggtccaaatgaaccaagcacctgcctattagaggtgaacattacccagttactcaacatatgtacactcttcattgtaaatactgcctctatgctatgattgagcatccattccaatgttccatcctgagccccaagtaccctaactcaataagattcacaaaccaaagctgggagactaccgtatctcccattttggttgtgtgcagtggtttattttttctttgccttggcttattagcttccttagagggtgtagacgcttgccttgttagggtgttaccccatttattatcgtataagcccgtatccttcccccactcgagacatgcatgggtcaatgtcattccaacgatgtagagtttacctcctgattcgtgtgctgtccatttgtctcttgttgttatccttgccttgggtgattcctcacatggcatatagttgtgttgcatcaaggaccaggcccataaagcccctatcgttcccttaatgtcatgccaattccatcgcgtgaagatgtcaccatttggctctttccagtagctagtgctcgcaattgtgtctaccacctttccttcctcaagggagtgagtaccaagtactaataccacccatagaggtcgtagttggaggtaggttatgagcacataagaacctgcaaaaaagaacacaaagttagcaaaaaacatagccaccatgtactcctccctaaggacttgtacttggtgaccaagtgtgatctccttgcactatctccaccttgcccccatacttctcaattctttgctactttcacccttagataaggccattttagattatcttcattcacaattgtcctcccttttccatccagattccagtagccatgacattcaatgtccccctcgtccaaggcataattagctaggtgatccgccagtttgttagcttccctaaacacgtgagacaccttgtaattacccctctccctgtattgccaaatctcctccatcatgtcaactatacaccatggtggcttccactccttttcaattacattctttaacaacattgaatcggtttggagccacacattatgaaagttacgttcatcacatacctttaaagcctccaaaattgccactgcttcagccatcgtatttgttgtttcctcaatccccttacccaatgcatacaccacatctccgtgctcatctctaatacacaaacctattgaactcctgcctgcgttaccccttgaagcaccatcagtattcaccttcaaccacccctcattaggcatttcccaaacaaccttttcatatctcaacttagggtgtattgctctagcatttccagtaggttaatccacttgtgaggtacattttttaggccaggtttcctcactttcacaagagattgtaaagaggaagaaacttgatagatctccctactaatggacactgcatcaccgtacttgaagctattccttctcttccataattcccacacaatgcaagatggtaatgcttgcattatcagcttgattcttggcaccacttgcattgtccaacacctaataatggcttgatgcataatgagatcgtccacccttattccagccctagagaggaaatatttccatacaaccttggcagcatgagaggtaaagaacaaatgggataatgtttcttccttgggttcactacaacaccaacaccttgagggcatgagataccctagcttcttcatgaaatcatctaatggtaactttgctctccacactttccacatgaaaaaggcaattttgaatggcaatcctttcacccaaatatttttgtaagcaattctaggatcattccttcttctcacataattccacgctgacttcacactgaaattcccccttgcttccaacatccagtatggcacatcgaccacattctccattactggaggctttattgtatccaaaatatgagtagcaaactccaaaggtaaagcctccaaaattttctccacatcccacagtccatcttccacgacatcatagacattatgtattgtttcatctataccaaactccggaggaacaaggaaatatagagcccccaaacctgtccagttatcaaaccaaaaaagtgaggatcccatcttagggtgccatgtgatttggtgttctatggtatccctacattgtagcatcttcctccatatatgagacccctttctccaaggtacaataattgtattgaacttcttacaatatttttgactcatgaaggaactccataggcttggctttgtcctataattccaccacaatttacaaaataaggccttagaaacatcatgaagagaacgaaagccaataccttcttcctcacacggcatacatagagaattccacgaggaccaatgcctactagtacctccaattgcgctactccaaaaacattgagcaaatatcttgtgtaacttgttgataacactttgaggagggttcacaactgagagcaaatgtatgggcatactttgcaatacatgggagatcaatatagccctacctccaattgatagcaattttcctttccaaccttgtagtttgttcatcacttttgtaatcaaatcttgataaaactccatcttccttcgtgcatagaaaataggacaacccaaataagtgcaggggaattattttctattaattccagtagccgtctccacccttgtcaccacatctaactccacgaaatgatgcatatacaaggctgattttcctttgttaatcatctggcctgaagcagcttcataggcaccaagtacttgcatgattaatctcaatgaaatttcatcagatgagcaaaaaatgattgtgtcatccgcatatgccaagtgattgattttaggactcaattttggcatcccaaaccccttaaaatactggttcaaatgcaaagcattcaggcccctagacaatgcctccgcagccacaatgaacaatgcaggagacaaagggtctccttgcttcactcctctagttgatttgaagaaaccatagggctggccatttaggagcacaaaataccaattgtttgagaccacaccaaatgctgatcctatgaacctttcatcaaatcccattttcctcaacaccttagtcaaaaatagccaagacaacctatcatatgcctttgccatatcaagctttataaccacattaggtccagccttagtccttaacctaatatcagttataatctcttgagtgagcaacacattctctacaatactcctccccttgacaaaccctgcttgttcctcagatattagattgggaagaaaacatactaacctttcatgaatgaccctcgagatgattttatttgagaaattgctaaggcttataggcctcatgtctgaaaaagtgatcacctccttcttcttaggaagtagtacaaggtttgtatgtgtgatacatttaggcatttcatgtccattaaagaatgctctaaccatatcaaatatgtcatcccctacaatatcccaacaagtatgatagaagcatcctgtaaagccatcaggacctcttgcactatcaccatttaatccatacactgcctgcttcacctcatccttagtaggctgcctcattagagtttcattctgcccagcatccaccggttttggtacaaaatctaggatcctgaagtcacaaggcaacgacctttctgtaaattgatccttgaaaaatttaattgcctcctcagctatatcattgtcggcctcagcccagtttccagcattgttttggattcgtttaagttgtagctttttctttattccattcacatgagcatggaagaattttgtgtttctatcccccaccttaaaccattgcatcccagcgttttgcctccagaagtcttcttcaatagccaaatatttcaacatgtcagcttgcaccttatgtaacctctctctatttttacgtgtagggaaagattcaaactgatcctcatgtactttcaccacttcttcaaggctagcaatgcgttgaaaaatgtccccatatgtagccttactccatatggttatatccttcttcaccttttttaatttagcattaaacatcacaaacagattggcatgaaaatcaacttgccaattctctttaatcacatccttgaatgtctcatgctttgcccagaaattcaagaatcgaaatgtctttttcacttgcgccttttcaatgtcgcactttagcaacataggtctatgatctgaacctattttagctaaatgtgtgacctcaaaatctggaaatagattctggaactccaagttagcgaaacatcgatcaagcctcttgaatatatactcctcatcagccctaccattccaccaagtaaatatgctacccttgaaccccaaatttgtgagattacaagtggtgatacaatgtcgaaattcatctatcttgttgattgaaactggcagacctctaaacttctcctcctcatcccaaatcacattaaaatcccctcccaaccatccatggtgcagtcatgtccctagccagattttacaatgaatcccaaagctctatcctctctatggagtcacactttgcatacactaaggttaagaacaattccacatgagtttcagtgtgaaatagtcttaaggtgatttgttgcaccataatatacaatatctccacctcaaacacctcatctatgaacacccaaattttgttagatatgttagcaatcgcttgggaaaaaccaattctccttctatacttctccaatttacttgcttgttgcttgggttccatgattccaatgaactcaaaatgatgttgcctatgcattgttattaatctctcaaatgtctgcatggtattacagacctaatgttcaaagttagagcatccattaaaggttggtcgattttgagagagtccttctagtttgcactccagtagtaggtacaatagatgcatccttcactggatctttgactaccttcttcttccccttggctcctaattttcctttctccatgtaccttggggataaatctccttgccttgctatatttttgaagttctgggcaatagattcctcatcagaatccttgtccatagtgtcatcatgatcagctgccctttttccttctcgaccagcttcataaatctccttgttatgcttttgggttagttgttgatctccttggttagcctgctcctttcctccctttttgactaatgaatcctgtatgccttcatcttcaaatgaatgcacctcataatattgctcattcccagctcgtacaacttgatctttcatacctgaagccctttcaatatttgtaacaactttggttccacctggatcacccatattaacattgatgtccttatggtttactgtagcaaccctagggctaccttctatactttcagggttcctttgtgaactggtagggttcccttcaccttccccttgttccatcagtttttcacctactagtaacaacctttctgcaacctccaacattttgccttgtgtgtcattgtttgcattgtcatccccattaacaatttgtccttcttcatctacagcaacatctgaatccctttcatcctgcattccatcaggaatttcaccctcttctgaatcctcttcgatttgatggtcgacccataacctacccccactccacgtcactctttcgtttgattgaaagatctcctcactttcatccactcctttgtgtgttaatgtcttcttattcttggctaatatcctttctaccctagtttattgagaaggaacttcttgaacagatgtgtttgtagccaccatgtccccagaaaaattacgttgaacccattgagtcgtagattccctacgtctttcctcctcattccttcttctattaggagttgtagaagccccttgttgtactgcctccctacctgcaggagcaataccttccttattagctacaatcccagtaagtgtaggattaaaagcaggagcagttgcatccaattgtgtcccaggtgccctaggcttgatactcgacttagttgtcccattcctagtaacaataggattaggaggagctgcagtttgtgtcaccagtgccaatgcattgttcacatgttctccatcttcaatctctagtattgcaaacttgttagcattctctacttgcgattgttgacccttgggctgaatcacttgaacaatttctttaccagcatcaccttgatcaataccttgtctattttctttctttgctcgattgtctctaacctcttgccattgttccttacccttcccagttacattacctactaccttgcctcagaggaacaacactatacaaaacataatctcatagtacatatggcgtcacaataaatcatataaagcattacaaagaaaacatatcaggcattacgagaaaaaaacatataaggcattacgagaaagcatacaaggcatgatgtgggcctaactacccggacataacaataatagacgctacgcacggactctcgtcacttggcgcgtacgtagcccgcaaacaatttacacatagcatatacatcacctatggggacaattccctcttacaaggttagaaaggagacttacctcgtgtcgaatctaccactcggaccacaattgcgcccgaaactccgaactctgcacccgaggactcgcaactagtcaaaaggtgtaaaattaaatcaatgcatgcactatgtgggaaattatcttagttattcaataaaatcgccattcttgaagaattctcaatttccaaccccggtcctgcatgatcaaattccgaaattctcgaaggggtcactcacctatagcctaaggatcattaaggtgtgattcctacttgaattcaaggcctaaaatggaaaatcacaaaatcctcaagaaccctaaaattactacctaattctattattttagataatttagtagtgattttaactaggaattaatgtttgaaactagtaaaactatggaatttacttacctcaatagcagtggtggaaggtcccttgaagagctctctaaaaacttgaggaggaagatgaaaatggagggaaaatgctaagtcccgtattttataaaactgcccagggattccttaactgcgatcgcgacaagggccctgcgatcgcgaaggccaactggccagacctctgcgatcgcgaagactaactggccggacctctgcgattgcggcataggtcctgcaatcgcgaagaacaaactcacccggcccagacgcgactcaaagcgatcgcgataaaagactatgatcgtgaaggtgtggaacccagacctctgtgatcgcaaaggggaagctgcgatcgcagagaacaatcaacagcccagcaaaatccttctccgcgatcgcaacccaccttctgcgatcgcagagaaggaaccagatagcagaaatttctggtttttctaacttagctcccaggggtctaaaacacacccgagcccctcgggaccccgtccaaaagcaccggcaagtctgtattcgtgatacggactcgttcgaactttcagaacatgaaaaacaacaacgaaactcaaaattcaaccccaaaaccaaattgaatcaaaacttaagaacttgaaactctagaattcacttcaatgcaccgtaccggtctatgctactcggaatgatttcaaattttgcagacaagtcatgaatgacataacggaactatccccggtctcggaatctcattcggacctcggtaacataaaatcacatttcaagccaaatttcaaattctatgaaaatcctcaaaacttcattaactctaattttcccatttttatccgaaacccgtcaaatcaagtccgttttttaccaaattttacagacaacacatattaactatatcgaacctgttccagacgccggaaccttaatacgggcccgttatcacaggtttcacagttcattttcataagcatttattatttacagaaaataattttctttaaaaattcatttctcggacttgggtcctcggaattcgattccgggcatatgcccaagtcccatattttcctacggaccttctaggaccgtcagatcacgggtccgggtccgttcaccaaaagtattgaccaaagtcaactttattcaactaattatcataaattcaactctttatcaagttttcacataaaggcttcctggctacgcgcccgggctgtgcacgcacatcaaggtgagattgacggaggctttcggggactcggaacacagtcataattaaatttacataagatgaccttttgggtcatcacagtttactcaaaattccagtcttactcaatttcctcaacttaaggcttctgaaatgagaattttcctttcaattaaactccgaacctcctgaatttcaactctcacaatacacacaagtcacaatacccgaaatgaagttgttcatgactcccaactgctgaacgacgcgttggatctcaaaacgaccggtcgggtcgttacattctcccccacttaaacagacgctcgtcctcgaacgtgccaagaactgctctggagttatgtgaaatcaccgtttagcacctcgtgcacctgcccgtgctactacaaccccgctgagcacacaagcttgatcaaatctgaagataccctcttcttatacacacaagacgttctgaactcggttccaacaacctgaaattctctgccatgcctaattctaacatttgaacacagtatcaactaccacacgaggcaccagaacacaactgcacgcctttgctgaatcagcaccatacactgcatagttcatcatctgaccacaataacgctccctgaaccttaatagccagaattttgcgaatttgatgctctcaaggcaccttatcagatacattcatacattctgctataacgctgacgatatcaccacaacagagaagatgtgtaaaaattcattgaaactagtaaaaccatggaatttacttacctcaataacagtggtggaaggttccttgaagagctctttaaagacttgaggaggaagatgaaaatggaggaaataggctaagtcccgtatttaataaaactgcccaggaattccttcactacgatcgcgacaagggccctgcgatcgcgaaggccaactggccagacctctgcgatcgcggcagaggtcctgcgatcgcgaagggcaattgtgcccagccctggcttggcactatgcgatcgcgaggatggggctgcgatcgtgaaggcatggagtccagccttccgcgatcgcgaagatgaagctgcgatcgcgaagaggaagctgcgatcgtgaagaacaatcagtagcccaaccaaattccttctccgcgatcgcgacccaccttctgtgatcgcagagaaggaaaccagaaagcaaaaatcaggtttttccaacttagctcccaggggtccaaaactcacccgagcccctcgggaccccatccaaaagcactggcaagtctgtattcatgatacggactcgctcgaacttaagaacttaagattctagaattcatttcaatgcgtcgaatcgacctatactactctgaatgatttcaaattttgcagacaagtcataaattacataacagaactattcccagtctcgaaatttcattcggacctcggtaacataaaatcagattccaagccaaatttcaaattctatgaaaatcctcaaaacttcattaactctaaatttttcattttgatccgaaacccgtcaaatcaagtccatttcttaccaattttcacagatcacttaaataacacatattgaacctgttccgggctccggaaccataatacgggcccgacaacacaggtttcacatcgaggttcattttcataagcctttattattttcataaaacaattttctttaaaaattcatttctcggacttgggtcctcggaattcgattccgggcatacgtccaagtcccatattttcctatggaccttccgggactgccagattacgggtccgggtctgtttaccaaaaatgttgaccaaagtcaactttattcaattaattatcataaattcaactctttatcaagtttccacataaaggcttcccggctacacgcccgggctgtgcacgcacatcgatgtgagattaacggaggctttcggggcctcgaaacacagtcataattaaatttacgtaagatgaccttctgggtcatcacaaccatgaaggtatcaatggatgtggacgtggcaatagaaaattataatcttctatttgtgataatgagaataataataattctcaaaataatctttcactctttgaaagtaatatttgtcatcgatttgacatgtgattttgtaaagcacatatagatgattatggtccattcatgatgagaatgtgacaacatctgatttatgaatacatattcattcttggaagaatatgaacgtgctagtggtagtgaatataccacactcacctctaaaaggaggtttgagatgatataagaaaataatgtcattattatggcatgaatgatcattggtcatgtacctattgtacgccaaaatattttgacaatttgattactaaaggataacactaatgcaagaaatagatcttgcatataattttgacaatgaccataatttataactttctcctgaaagtaatattcaccacattgatgttgatgaatatgtggtagcaccaaattaattgagctggaagaaccaattattactattttggaggaatacaattgattatcatgtctatttattatgttgtagtaagtatcaaagaaacttattgagtttataaagtattcgcgaaagcgattggttatactgagattataaataaaggaaagatttaatatcttctattactacaacttgtagcggggtaatatgcatgtgaaaagttacccgctttattctccagtgaataccacaataaagtggatgtttattgataataaaacccatatcacaataaacttggagtttattgataattgcgcaagtcatggtgtaaacctgaactttatcaatattgataatttattcaattggcataattggtttagccatatctatttaagtatgatgtgcaaaaatgaaatagaattcatatggataaatattaaagaacaagaaagttctttacgaattctcttattatgcttgttctcattaattaatagatcaactaaaattgggattgaatcccatgaacgctgaaatatcaaaggtgaatatgggcccattcaccttccatgtattgtcacgacccaaaatccataaggtcgtgatggcgccggacaccgctgtcacgcaagccaatcattaaattgttaggttaaatttcctgttttagcatttttgagatcattacctttcacttcattacataatactgaataaaatccgctaagtaaatacaataatttaatatcccattttaataaaatacatcccaaacacatcccagaacccggtgtcacaagtgcatgagcaaattctaagaattatacaagtgctcgaagcttgtcctaaatataaattggacaaggaatttaaaataaaaatagatacaatgcgagggagactctgtcagttgcgtgtcgcctccggataatgcagctcactaagtcttcaatgctgaccacatcgctgagaaagtacctgtgcaataaaaatgcacagcaagtgtagcatgagtacgaaaacaacatactcagtaagtatcccgcctaaccttagagaggtagtgacgagaggtcaaatttaacacttgctataagtcagtctagtataaataagtgagatgctaagcatgagtatcatatgaaatttaataataatcaaggataagaaatatcaacttctttcacatttaacacattaaaccttcgtctttttagttggtgatttaaaacttcttaggccaataaacagtaataattacaggaaatatgcaacaataatcttgcgcaagaaaatgccgagggtcgaacggcgtggaccaacaataataaacggtgcactgccgagggtcgaacggctcgaaccatagatgcatctatctgccccgttgttatacataaatacagggttatcctgctcgcgaatcatacatgcgactcaggcacccataggtacacatattcacacaataagtccacatttatcaagaaaacagttatccaggatagtggtaaaattctctttaaaagagcacgaaaaataacatttaaatctttgtattgaaattcatttattaagtttaatattatacaataatataaccttatcaggaacacaattatccatggacggttaaattctctttctaaatgattaagaaaggtacactctagctttctcaggaaataaattaccaattcaatagcattatcagtctaatattattggcaggatcacatttacaacacgtaaggcatgctagtgggtcctagactacccggacataggcataatagtagctacgcacggactcccgtcacctcgtgcgtacgtagccccaacaaataatagcatgtattcatttagtttacctatgggggcaattccccctcacaaagttagaaaggagacttacctcgctccgaaattccataaccgacttccaagcccttctgatgactcaaatcgttgcacaacgctctgaaactagccaaataacggcaaactaatgaaaatatactctaatacttgttaacaattcaaattatataaatttccaactccgctcgaaaagtttaccaattttccctcgggcccacgtgcccggattgttacaacccatattcacgtatgttggctcatgccataagttaatcgacataaacatgagaagatattatctttgagatgataagaggttaatcctattgatcttaaatgatacaagagtgtataagagtgattaacacgtattagaagttaaacgaatcaaggatgttgtaactcgtatttttgggtaaacctaggggtgattggtattctcaagaggtagtgttttaaggtatttgaatcatataatatccatatcatagtcttgaagtcaaacaagttatgaaacaaaagtcgacaagagttgtcgcaacttaggttcatagttttacttaaagtttaggtcaaatgttattaagcttttctcccaatctactaggaattacagggtgatatacccaccaaattaaatatatatgagtttagtttccaatttcattaaatcgtttatcaatacgatatcagagtagagagatatagactttttcgcgagactgcacaagctgctaggtgacaagtaggtgggtcacctacttggttaaatgatagcccaaaaagaggcaatttcgggtcagccaaagagcccattaaaagtcttatatcctgctatatatcacccattatatttcataaataaccagacctaaaaccctgcaaacttcctcccaaaaattatccacaaaccctaattgattttccctctctttcaagttcaaattgggggtaaaccctagagtttgaagaaccaagataagggccgagttatccaacgagtaaggtgagtttattgctctatttaatccattattttactgtaaattcatggtaattcgttttatacttgtaagaactcacgggacggtgatcggaagccgtgagttcgagttattcacttgtagcggactgttttgcggactgttttgtgttgatgttgggctgggtgttttactactgtattgtggagttttggaggaggaagggtgtgtagaaacaccatatagatgtagggttttggtctggtcattcatcgtaacatttccgggtcgtttgacacgactacggtggtcgtcttatgtatgaagttattaggttgtgtatggactattttgggaggctcaatttgattattattggtgttgtttgggctgtttgatgattgtgtttgacttgtgtgaagtcatatatataggggatgttctgtccatttcatcgtaaaataggttgtggtcgatacacaatagttatgacgcttaaatgataacgatagtgtcgtttctcttattgtagactaaggagtcgtgacaattgcatagcttgagattggggcagtatatacaaggtatgtgaggctatccctttccttcttttgcacgactccgattgtacataatgcaatgaacgagcttccaaagatactctagcagtacttacattgttttccttcttatggaacaattaattttgaggttgcttctcttattcttatgttatcaatgttgttggtacttcctgattattataagattcttgatgaagagttaatcctaataacatgtacggagaatatcgaccttacgtctctccgaaaggttcagaatatgattccaatgagtcctacatgcattatatatatatgtagctattttactctaccgagccacgctatagtcggccgggtatggcacctattgtgcaaccactgatcagttgggtttaccgagtcctctttgaggccgggtatgatatgataatgatgatgcccacagaggcgaatgttctatcatgatgatgatgcccacagaggcggatgttttaaaagattatgtatatatatgtatcatgcatttcatgttactgtctcttagaagcatttagatgttacaggttgtatcttctctacctctctttacattattgttcatatttatattgaccaaccttacatactcagtacattattcgtactgacgtcctttttatttgtggacgctgcatgtcgtgctgcaggtcccgatagataggtagacgcagttcccccaccacagtaggttttctagttcagcggttataggcgagctcccttctccggacttgccgtggtcttggtatgcatttttgttatagatattatgggtatgtcggggccctgttccgactatgttgcattacttatgctcctttagaggctcatagacaggtgtcggcttatgtatagtttggtatgccttgtcagatgatttttgttgtatagtctttcatggaagagtggtagctcctaacttatatatagtttcttggaagtcttgttatcctatgttatgcatgttcattccattatctttcattgtttggcgttcataatccatatctaccacttatattgatctcgtcggcccttaaagataataagaggattagatagaatgtacgttggtgctcggcaggtatggcccgggtaccagtcacgatcctctagtttgggttgtgacacggattccgaaatttttcgaagataatgattacccataactttactagctcaaatatataatttactcttaatttcatgctcaatttcgtggtcaaaatccaaaataccaatctctaggtcttctaccaaaaacccacaatttcaactaatttccactaatttccatgttctaatccatatatacacatgtatttaactcaaaattgtgaaaaaacacttaccacatttcatatggtgaaaatcgtctaaaacatcgcttcaatccgagctccatagctccaaatatgctaaaaatggccgaaacctcgatatataacttctgcccaggtatttactcatcgcgatcgtggaaaatgcttcgcgatcgggaagtacaaaaatttacatcccaatattttctcttaagaacaagtgcccagctcttccggacagcctctagtagaatggtcatcaacgttttgcacaaaactccaaatgataaatggtttaatgttctgaaaattagacttcaagatctacaactttcatgttttagtcatctcccaattccttatagatttctagatataagctgccaaatgcagccctgtgcaacacaaatttcttcttcatcttcccggaaaccctatagtgtaacatctatatctatttgtacacaaatacaaatgataaatagtttacttttttagaaactagatacaaaggtctactactttcatgtttacatcatctcaaaattccttatagattgtgagatatgagcctccgaagtcgagtcagtgcagtagaacatttcctctacgcgatcgcgaaaggctttccgcgatcgcatttcactggcccatttctctcattttactcatcgcgatcgcgaccaattccccacgatcccgtagcacactgctgtagccaaaaaccagcagctataaatggcctagaaatggtccgaaaccacccgagccccttaggaccccgtctgaacgtgccaacaagtctgaaaacatatcacggacttagttgaggcctcaaatcacatcaaacaatgtcgaaatcacgaatcgcaccccaattcaggcttaattaactttagaacttgaaacctctacattcgatgccgaaacctatcaaatcacgtccgattgaccccaaattttgcacataagtcatattcaacattacggacatgctccaacttccggaatcgcattccgacctcgatatcaaaatttccacttccggtcggattcttcaaaaacattcaaatttctatctttagccaaacgacttcaaaatgacctacggacatccgaattcaattctgatcacgctcccaactccataatcaccatacgaagctattgtcaggctcggattcccaaacggacatcaatatcactgaaatgcgcttccaaacttaggaaatgtcttcaaaaatgctgacttccacaatatatgccgaaacgctctcggattatccaaaacccgatccgtacatatgcccaagtccgaaatcatcatacgaacctgctacaaccttcagatcctgattccaaggtcgtttactccaaaattccaatcttagttgattcttccaacttaaggcttccgaaatgagaattttctttccaaatccacctgaacttcccgaatttcaattccgaccatgcgtacaagtcataacgcctcaaatgaagctgctcatggccccaaaccgctaaactacgcgctagagctcaaaacgaccgatcgggtcgttacattctcccccacttaaacagacgttcgtcctcgaacgtgctaggaactatcgtggagttatctgaaatcactgtttagcacctcgagcacctgcccgtgccaccacaaccctgttgagcacattagcttgatcaaatctgaagatcttctcttttatctatataataagctcagaacctagttccaacacctgaaatttctcctgcgaggcctagttccaatatataaacatcgtatcaactaccaaacaatataccagaacatgactgcatacctttgttgaattagcaccatgcaccacatatttcatcatgttacacaatgacactccctgaaccttaataaccaaaattccacgaatctgatgctcccaatgcaccttatgatatatatacatcctgccataatgctggagataccaccacaacggaggagatgtgtagaaatttctaaccaattgcagagttaaccaaacattgaatccttcctcttgactaagcacatcatctcattacgaaccaataagggtaactgtcatttaatgtatttcacataatcttatcgcatcgatccctgatccataaatctcgtctcacccagtatgaactgctcagtcaacaaatcactcccagatatgaccatcaatctcacgcgatgccacaacgcgccaataggccacaactcgaacatgatacataaggaaatgactcaggaagggactgctcgactcacgcaactaatatgaactttccttagaaaataggaagtataacacaagaaaataattatagggaaccgtactcatcatcacactgatgcgacatgcaacctgattcaaatagtatacccgtggcggcgtgccacccgatcctatcatgaaactcacatacggagatacacacgaagctgaatcgctcactattacacattactgaatatcggtcacaagcacgctaagtgcataataccatcttggggagactgacagagccatatgctacaaaacttaagcacaactgaggtgcaatatatatactctgaatctcaagagctctcctgctcacataacatcatcactacgcagaaactcaacacatgagaatttaccaagccgttcaaaactcacacggcataatcataatactacatgaattggacgaagacggaacaacatctgatattccaacaccccttctttgaggtgcgctatactgaaatgaacacatttgactaccatgaagcccttaatcctgtttaaatacattcacccacttcaagtcgattctgcttgcactgaactaggctaacaactttacctgggtccataatgacccacttcctctcatgacacacatgaacaatcattgtagccgggacaaacaccccacaatccacaaccaactgaattgaatgccttctaggcataaattctcaagtaagcaacattacacttccttaaactcagtctaaatcctcaatcctttaagtgactacatgccacactcatacgatcttcctgtggtcatgctcccacgtccttccacacaggtatcaagtcttcacattcacaccaccgaccacactaacgttgtaaaacaaatcaagtacccataaccaggaagcaaagcctctttcatcaaacaccgatctcaggtgacactgaagacaacaccagtttccttgcttatccgagctcatgacatccttgttaacaccgaaccgcaatctcgatttttactcccaattacatattgtttgccgcacctaacatgtcaatatgagatggagcaagaattccatcataactcctgaaccactaatagggtgaacacttcatcacatagaaacctttttacttacctaaattcaagaaaaccataacaacacacaagtgaattctcacaatcacccaacatgcaaatccttaagtagtggtctataccaccataaacctttcgggacacgcctacacctgacaagccataatacttgaatccttccaaatgaaatctattacgacgactgacaagccccacacacatctgcacaaaccatacacataactcaaccacaccaaaggaactgatcactgtcgtaagtgcgccatttcaaccatggctaaccactctatctccttttaatcatcttcaattgcctcaggaataatagtaactccattcatcacacaacgaactcaatactcactcatcccgagtggcttgactcacgagaccatgctttctaaatccagcaaaccgtctcatatccttctgaaaatctttctacagcccggattttactcatctcactccttcaatactcttttgcacgccgaaaataacatagaacactccaaccattttccctatctaaaaaattatactacaaaagctcgattcttaatcatactgctgcctgaaaccattaaacacctcattctttgaattcgttaggaccgctattgagagtcacccactctgaatggctccaaatacaatcaactccaaggctcttctagcacacgaacacccttttcaatgaagcacgtgactgagtcactaccctaacaactcgcatatgccttaagcataaattctgaatcttccaaaacctaaccctggtccaataggacaaacttttgcacacgtttatcaaatcccatgcacaattaccattctactcctttcccttagctgtactaacttgccaatacgccgacaatgcgcaaccccatgagaagacagtcctacaacccaactgcaggcggtgggactcccccacttagcccgaagctactccttgcactattatagacccatgttgggatccttcctcctttgtaaacatgatcttgctcgaccaatccgcccaattcttctgaattctcctattagcacttcctgaatactcaaattgcctagaatcattcacatattctacctcctaccgaatagccactagaatcccttgcagaaactttccaaccacataaccgctaacctactcacaggagataacccacatgtggaaatcaccaactgataccttccaacgacgccgtaatgcacactctctacaacatcaataccccatcctaagcatgttctcattcaccaactttaccagtctttccactccgcacagacatccattaaatgcgctacaatatcttctaattcaccactatgctgccgctctcccactttggttaacctcattcctttaagcactacctgacttccttttcttacacctgacctttccgaaattcatctgccccctgacacttctcaccagtcttccttcgccgtatgctgcccaactgttgcctccattcaatatcactctctgtagctcttaaaccagccgatcacctcaactttaaatctttctgaagatcatcttcctcgagttgccttcattagaaataactattcaatcctggaccaccacacaccacgatctccgacaaccacttctttaatactacttcacaacactctgacccaatgcaactgaagaactatatcaccatcgaacttaacacattccattcgattgatgatgacgatatcacattacaggtgagtattccaccgcactcgaaaacatcaagtcttactactttatcaacccaaacctgaccactcatagtcccaatgcccttcctttgccggagctaaaatactgaaatctcgaaatcacgccttgagaagacctcccttcaagtcattcatcaccccaacgcatgggcaagcattctaccatcatatcaacaccgcgtgataaccaatcgtaagcatcatcacaacttgagcataacctcaaagctctcagaatcacaaatactaggctgaaacaacatattactcttacgccgaacaacgacggtagcctcaatcaacctcgcagggagaaacatcccgcaccacatacatagtatcattaaaattcctcaaatcctcgattcatagcaagcgcttcgcgacgtataggattgaataagaagaaaatgcaggcataagactcaaaggaatcaaatcacacgatgaggaatcaagaagggaagtactcctaacatccttgtagcctctcgaagataagtacagacgtctctgtaccgatccgcaagactctactaaacttgctcatgactcgtgaaacctaagggaacctagtgctctgataccacgttgtcacgacccaaaatccataaggtcgtgatggagccggacaccgctgtcaggcaagccaatcattaaatggttaagttaaatttcttgttttagcattttttaaatcatcacctttcacttcattacataatactgaataaaatccgctaagtaaatacgatagtttaatatcccattttaataaaatacatcccaaacacatcccagaacccggtgtcacaagtgcatgagcaaattctaagaattatacaagtgctacaaagcttgtctgaaatataaattggacaaggaatttaaaataaaaatagatacaatgcgagggagactcagtcggctgcggatcgcctccggataatgcagctcactaagtctccattgctgaccacatcactgagaaagtacatgtgcaataaaaatgcacagcaagtgtagcatgagtacgaaaataacgtgtactcagtaagtatcccgcctaacctcaaagaggtagtgacgagaggtcgaatttgacacttgctataagtcaatctagtataattaagtgagatgctaagcatgagtatcataggcaatttaataataatcaaggataagaaatatcaacttctttcacatttaacacattaaaccttcgtcttttcagttggcgatttaaaacttctttggccaataaacagtaataattacaggaaatatgcagcaataatcatgctcaagaaaatgccgagggtcgaacggcgcggaccaacaataataaattatgcactgccgagggtcgaacgactcgaaccatagatgcatctatctgccccgctcgcgaatcggtcatgcgatgcggttatacataaatacagggttatcctgctcgcgaatcatacatgcgactcaggcactcgtaggtacacatattcacacaataagtccacatttatcaagaaaacagttatccaggatagtggtaaaattctctttaaaagagcacaaaaaataacatttaaatctttgtattgaaattcattcgttaagtttaatattatacaataatataaccttatcaggaacacaattatccatggaggattaaattatctttttaaatgattaagaaaggtacactctagctttctcaggaaataaattaccaattcaatagcattatcagtctaatattattggcacgatcacatgtacaacacgtaaggcatgctagtgggtcctagactacccggacataggcataatagtagctacgcacggactcccgtcacctcgtgcatacgtagccccatcaaataatagcatgtattcatttagttcacctatgggggcagttccccctcacaaagttagaaaggagacttacctcgcttcgaaattccataaccggcttccaagcccttccgatgactcaaatcgttgcacaatgctccgaaactagtcaaataacggaaaactaatgaaaatatactctaatacttgttaacgattcaaattatataattcccaactccgctcgaaaagttgacgaattttccctcaggtccacgtgcctgaattccgaaattttttgaagataatgattacccatgactttactagctcaaatatataatttactcttaatttcatgctcaatttcgtggtcaaaatccaaaatatcaatctctaggtcttctaccaaaaaccaacaatttcaactaatttccactaatttccatgttctaatccatatatacacatgtatttaactaaaaattgtgaagaaaacacttaccacatttcatatggtgaaaatcgcttcaatctgagctccatagctccaaatatgctaaaaatggccgaaacctagatatttaacttctacctaggtatttactcatcgcgatcgcggaaaatgcttcgcgatcgcgaagtaaaaaaatttacagcccaaaatttgctcttcgcgatcgcgaagaacaaatgcccagctcttccagaaagcctctagtagaatggtcataacgttttgcacaaaactccgaatgataaatggtttaatgttctgaaaactatacttcaagatctacaactttcatgtttttgtcatctcccaattccttatagattgctagatataagctgcgaaagtcagccttgtgcaacaaaaatttcttcttcatcttcccggacaccctgtagtgtaacatctatatctctttgtacacaactccaaataataaacggtttaattttataaactagacacaaagggctacaactttaatctttacatcatctccaaattccttatagattgtgagatatgagcctccgaagtcaagtcagtgcagcagaacatttcctctacgcgatcgcgaaaggctttctgcgatcgctttcactggcccatttcactcattttactcatcgagatcgcgaccaattccccgcgatcgcgtagcacactgctgtagccaaaaaccagcagctataaatgtcctagaaatggttcgaaaccaccccgaaactcacacgagcccctcgggaccccgtccgaacgtgccaacaagtctgaaaacatatcacggacttagtcgaggcctcaaatcacatcaaacaacgtcgaaatcatgaatcgcaccccaattcaagcttaatgaactttagaacttgaaacttctatattcgatgccgaaacctatcaaatcacgtccgattgaccccaaattttgcacgcaattcatattcgacattacggacccgatccaacttccggaatcgcattccaatcccggtatcaaaatttccacttccggtcggattcttcaaaaaccttcaaatttctatctttagccaaacgacttcaaaatgacctacagacatccgaattcaattccgatcgctctcccaactccagaatcaccatacgaagctattcttaggctcggattcccaaacggacattaatatcactgaaatgcgcttcaagccaaacttaggaaatttcttcaaaaatgctgacttccacaatatatgccgaaacactcccaagttatccaaaacccgatccggacatacgcccaagttcgaaattataatacgaacctgctggaaccttcagatcctgattccgaggtcgtttactccaaaattccaatcttagttgattcttccaacttaagacttccgaaatgagaattttctttccaaatccacccgaacttcccgaatttcaattctgaccatgcgtacaagtcataatacctgaaatgaagctgctcatggccccaaaccgccgaacgacgcgctagagctcaaaacaaccggtcgggtcgttacatgtataccacatacgatgcatctatgagttggttacatgtgcgattattattaacctgcaactggtgtttgcgaggtaacttgctcaataatttaatttagagcataattttcagattgtctattcaagacatttcattttgataaattggtttacatcacaattggtttagcaaaatgatttgttgagtgcctccacttaatagctaatatattgcttatgagaatgaagttatctatatcagtttgatacatgttatacacgaaagtatattatattctcccatcacaagtggttcagggtcaggaactaaataatttcatcttattattattgatgtgcggtgtatattttgattaacaccataatgcacaaagatgagttcccaaaattgaggaagaaagttagtttttctaacatgagtgggagacctgataaaaggttacgtggaaagaattatcatttgtacatctggatcctcgaataagataatatgggacttgaagttcataaaaaataattcatctacaatgcaaagcatgccagacgcatttgctaacccaaaaaaagtaactatattctcattacaagtgctcctattatgtcctagaaggacaaagtctatggtccgcttaaagcgtatagacaaatcggctcaaataaacttcttgataaagaagatgaacaaatgatcaaaatgatcataataaaggaggcatgtgatctagaagatcacatgacataacacttaataaaatctcaagagaggttcaggtacctgaaaatatgaatgaagagatctctatgttatgtctttatggaaaaaaatatatattgcaaccgatataaaatgttcgtcgacaacatctttcatagcgctaagtatacatgaggatcttaaatctgttgaatatggacacaaaaatattggccaaatgaaagaaacacaattcgaatagaatttgtttcatatgaaagacatatagttttggacttgcagttcaaacatttgaaagtataaagtcaatggtttgtgcaatcacttttatctatcttatgtctagcatgacataaaaacttgatatgcatctaaagttcattcatatgttttatatggctttacttatatgacaatccctaaaggatttaaattgcttaaagcatatataattcttggtcctgaagtaccacatcctatgtgtaatttgtgcacatatgtatcttgctataactataagcacgataatgtgatagcgagaatttttccctccaaggagatattgaaaaggctattccacgatattatatgaagacattatatatatacaagaatgatgatttcgaggtgcaacaaattcgttcgagtgagaatatgattgatttgttcacaaaatctctaccgacgtcaaccttcaagaaactagtgcacaagattgggatgcgaaggctcaaggatgttaattgatgctctcatcagggggagttaatgcgcgctgcactcttttttccttacaaggttttgtcccactagttttccttgcaaggtttttaacgaggcaaccaaaagacatatttttaaacatgtgtactctttttccttttctagattttttttcccattggattttattttagttaaggttttaacgaggggcattaatagttgaatagacattcaagggggtgttataaatagaattctatttatggtgaatgtttatattctagagagattctaggatttgttacttggtgactaagttactctttccctataaatagagggggtcttaccccattataaattgtcccaaaattcaataaaaatgcgctttctctttcagtgcaatattattcttatttttttattgtttcgtaatataaataccaatttgccgttttaaatggcgccacaccttatcgtctccttttccatatcaaatccaatccatatcaaatccaatacatctttcccttctcagttcttttatctcggctccttctaatggagtctctttcggtaggcattttgacttctttacctctccaaaaccattccaaaacgaacaaatcctctccaaaatccccatttcccaaatcttctcccactttcctctgcaattcactccaactcaattctcccaaaaccagaaaaatcgctcccgttttacaaacagaacccccaattcatcattctacaaaattccaacaaatctttcataaattccatctctctttcctttctctgggtctctcttttcctcttacaacccttgccgctgaaacttcagtacccactgaagatattccctttaaaatcaacttagaagcaatcttggtctccattgatgaatttttcactaagtatccattttttgttgctggggttacctttatctggctcgtcgtgatcccgttagccgaagagtatttccaaaagtataagttcatctccgccgttgatgcttttgggaagctccgtgatgaccccagttcgctgctgttagatgttcgggataagaagagcttggcttatttgccttcgcccaatttgagaatgttgaataagagtgtggtgcaggttgagttccgtgaaggagatgaagatgcctttgttaagagggtgtttgagaatttcaagcagccagagaatactactgtttgtgttttagacaagtaagaacattatgtttgataaaatgcttagtacatattgtaacaatatatgtgagaattttgcattttggcctttgatgcttcgtgcttcattgtattttgttatgtttttatattttgtttttgggtttagtaagatagagtaaaatctttgatgtggttcctgtatgagtcatatagtattgtctgctcaaacttgcaagacttctggtagctagaactgttgcgtagtaggggaattatcataaaggtaaacgtaagtatttcagtgatgataatagagattgttatgtatatcgtcttttgaatattcacttgcatgattagcaaggcatgttatagacgccaaactgagctgggtttttccaattttgagtccttcatttcttaatatctacctgttttcttcatctgatcatgagtttaaagtggagcatttgacctgctgatgataaaaatcttaccagtctcagaattgattgaccttttctataagaagctttttattgtcaaagttttcccatgtaaattgatattacctgctttggcatagtaagatttggcaagcttttgtggcaatgtctattggctcatttgggaagaaggattgaaaagttcttacatattgttttctgtttgtctataagtattgcagtgtttctatttgggatcaaacatcttaagttccctactaggcgcgtaagtaggggcttctgtttgtttttgtgtcatttaaggagtatagacacgtacacagattgggaggttgtagctttgcgtccactcttatattttccagatgaacttgcaaatttctctagtgactctttttcctcattgaatcaaataactcttttaatttacaaaaagtgcaattgctattgtaaagtaaggtcatcatgaatgtctaccttacatcacctttatggttagtccaggaggttatggatggatttggcttaggtgttgcttccatgtgtctctttgtgtctgttcttccacgtcactagctatagtggcagatagtgacgtagtaacactcaactgtttgagtggttcaaagagtttgatggatatccttctttgatgtggaaggtagttttgatggaaactcaattaaagtggctgagctattggtcaaaaatggtcttaaagaggcttatgctatccgaggtgggataagaggcagtaaaggatggcaggtattcttcctttcttcaaagtagtttgagttaggctgatttaatctcttcattcttgttcagctgtatctttttgtgtatgtatgtttgcatagaattctatcacacataaatgatgagagattccaagagttttggggtcctgataacctgcatcttaccttgcctagttggcgacctaatagatgtggccttagacacttttttaactttatgttgctggtcttcggaatgaaattagaagcttgatgctttagttatcagaaactgtagtatttcatcatttccttctacagtttattttttcctgcaggagatccaagaaacccttctccctccatctgttcatatctatgccaagaagaaggttaaaggaatgcaacagcaagacagcaatgatggggtgattcaagcaaatgaaattaatagtcaatctccatctgctgtaggcgtgacccaagttgagcagataagcaatggttccattaagaagtctgttgactcaacttcagcgacaaaatgtggtcctagatcatcatccccatatccaaatgtatgctctctctctctttctctctctctctctctctctccataagcaagtgtctgagattgcaaagctattaaaagactatctttaacctcaaaggtagtggaagggtgcttgggacaattctcaaatgccacttgctgcttcagcattcaagttggctgtctcatagaggagtctgccacacctgtcccaactgtgtataaatctttctcaaaatattattaccgggctccccctgcatcccacggtagccagcagttgacagtgccaaactcaccaaagaagaaccattatttcttatgtctcatttcctctgggtgtggtgatctcagtcagtttaggtcatgtactaatgctaagaatggtcttggggaacttctttctcctctttgcacacaactatcaaattgctttttgctggcaataactttaggcttgtgaattctctcaagtggtttattgacactgttatctttgaatcttgcagtacccagatttgaagcccccatcatcacctactccttcaaagcctcaaagttgacaacagttgcatgttgcttctttgatgcctcatatctcgtcggtcatgtgaatggcatactctttgccacgtctcaactgcagcttgacaccaatatattcctggaggcatgacagatgcacgctgatttaacaaaagcaaataatctctgatttttgctcgattaccatgggaatgcagaattacttttacaattcagttttgggcattgcatgtatcacaagctaaacatgctaatggatttagttatttctcaacgctgtccgaattccagagcaatttccgtattcagacgtacatgttcttgtcggagaggcaccatagattaaatcaccaagataattagaacaaaccaatgtgatcaggaaattgaggtacttgtaatgtgatacaagggatgtgacttccctccattggtttgagtgacatagcacaatgtgaaagaaagaggacataactttgagagtcaaagtaggtagataatagatagactttagcaacatactaactgacgaactagatgtcaaaatgaagaagaaaacataattaacctatgaactctaaagaagggtatattacttggggaaaactacccaaaatgttaattccatacacaatttcaacgaaaattagtccaaaacaaaataacgacccaaaaaggcacaaatgtcattttaatccaaaaagtttccagtaaatgtctgtttttaatgatcagcagtcacatttgacgaactcctcccagttgttctctgcactccttttcttactctctcactttctctctttaggtgattgtttcgatgctctttaccggtaaattacaactaataagttttcaatttgctcgtgcttgaagagagccttaattcgaaattgtgctaatagcatttcaatctgcaagctaatgacagaaacccaagtacaaaaaagttaaaaaaaaaagaaagagataaatacaaatcataaatgccagtatcttggtacagtaacttagtaaaataatttaaataagtgaagaagatgagttaggactctattgaaagccattgaagctcgcttaagattaactgtgaaaatttgggtttttgaacttgaaatttattacgaatggaagttgtttggaatatattgcgaccgagtacatctcaaggagtttgaaactcaattttggaatgaattggtggaggtttgaatttaaatttgagtcaaattcgaagtaaaaaacgaatatagaagaaaatgagatgtgtatcatactgtgtatcttccgcgtatcacttgagtatcacatatgtatcccttatatccatgtaaatatatatgtgaaatacatgtcagatccatgttaaatacatatgtcgtataaaaaaaatttaaagttgatttcaactacaaaatttgactcataactagttcaaaccacctccaatcttgtatattactttatctatgtattttcaacaaattccaatcatacctatttaaaaaaatattttttaaatgttatagtatatcattaataacaaattttgactccaacaagtccaagttatctccaatctctctcaaaatttgtatattgccttatttatttgttttcaacgaattccaaacatatttattgaaaaaattaatttttttgcctagatttctggatgttgtatatcgtttatggctatttttggtagtagctaaaggttgctaagttatgtcttattttggacattttcatacttttccctaccagaaacaccaattaactccatctacatttaaaatattcattttaccctgtatacctactttataaaagtttattcaaattttaaaattatgtaccattaaacaaaccccaccttttaagggatgagtttatctctctttccaatttaataaattccttaaaacaccccatcatccctcgtacctttccaccaaaacttgtgttcgctggcaattctgatgctgacaagcttaatggcctcattgataaacttaattctgggagcgatgtcagtgatgaatccatcgtccttgaatgtaaaagagggagaggggggggggggggggatgaattgtgttcgattaaaaacttagttgactaaatataagtttagtcgactagattctagacagttaatagttaaagagaaatgaagcaagcaaactgaaacataacaagacacaacagcttttatactggttcagtaccagtgaggtacttacgtccagttttccttgggtcacaagggttctcttagatcttgataataggttacaatggtgatggttttgattcgctcaccatcaatgatattcagcgacactagcctttataatattggcacaactctctttttgtgttctatctcttcctatcttttatgacacttgtagactcaagaatacaatgtttgtactaagaactaaaaaggtttagaaacagattgtgtagttgcgtgaagatcaacgtccttctgcttcttcctttatagcttcatgagtcttctgcttccttgacttctgggattgtactgagcaattttaggaatcctttccttgtgaggcatgtgtttaaccaaagaattagattctcagtcaaaagtttatttttagaagttctcgggctactcataaccaagagattccgtattctctcaataataagaaaggaaattagaataagaaatggcaaagtaatcgatataaaacacaagaaagtaattgtattccaataataattagaacgtgttcttacaagtgaaatctccttcccttacataggaatctgtaagtacgtcttttcctttttatgatcgaatcattatgaacattaatgatattaatgagacgttataattgataatcgtaactgttcatgaagattctgtcacgtttgtgatcattcacactcattaattgacgattcatgaatcttctctttttactgtcttgattcatcttgctgacgtctcttcatttataaattcaggctcaagtgaccgtacccattttctctcgtgagtgattttctcgtagctattataactcgtgcctcttctaatgaaactctccagctatcgctttttcaatgatccacatgtcttgccatattagccacacaattaattccacgtgtaatatttatttttaccaatacaaatagccccccacttaccaattattcaataattgaatatttgggaagtggatcacatttatggcgggaattttttatcgccgtttctcgtatatcattatgtcttcttcagaaccagcgcgtcgtttgtcacttccatttaatgcatgtgacacgtggcattcattgattggctctacaactcttcagcgggttttagggcttttttgcggctgcattagtcatgaagtgactgtttcattatgatgcttccatcatgaccccctttacatgacagttgcttcttcgtataaatacctcatatgcctttgctttcacgaaaaccttctacaatgttctttattcacaataattctttgttcatcagcacgtattattttcttatacgaccttgatcctcgtagagtggttacagtagatgaacttcccccttcctctgctcctatcagaagtagaagaggtggcatgttacgtagtttagggaatctatctgtggttcttcttctcaacccagtattactaccccttcgtcttctagaactagagcttcttcttctcatagatcttctactagaagtagggattctaatgaacctcttcgagaacccactgttgatgagattattcccacttaactttccttctctactgatagagaatcgattaggaatcaagttacctccatgacttcccatgatcgtgctaatgtttacccttcccagattattgggggtttgatttctcttgtgcgaagagaatatcactaaaaatccgatttcccaattttagtccctaatgcaaatcaaaggatcacttcatacaaagctggttattcttttgtttatacatatccctttacgttaggctttagaccacctattggcccagtcatcatagaattttgtcgtttcttcaatgtttgcttaggacagattggtcctattgtatggagggttgtggcatgcttaagatacttttcaaatttggcctctttaccctttaccatgactttccaacaagatatgataattattcatgagaatcacatcacaccagatcgcatcctcataccttccaatagagaatagtaataacactcttttatctacctttactcctctcaacatgtagggtacaatatgctcaacacaaagcaagttcaatttttcaaccatataaatgctagttgagttataaccatattctttgccaatgctaagggcacaaatcacagacaccactttagctcttgtttgaaaaataactttacattgtcttccttccattcggtatattgtaagttcgactttccaagttgttgaatcatagctcgcctcctttcactataaatacccgtttgaagtatcttgaacaaagattaaaagaattatgtatctctcaaatttggctttttccttcaaatattctcacctctcttgcctttttccactcaaagtaactcttggtcgttaatcagtaaatttattagtaaacttaacaagtcacaaccatttagtgataagaataaggagttagaaaaggaataggaaagtggaagaccaaacctataaagaataggaattggttagttttaaaagaaaaagaaaagaatttagacaatccaaaacccacaagaataacgaaagaagttaccttaattttcaagaactaggatccgctctttttgtttcctttcttgacttgaaaacaaaacaactattcacttttttttttgctgaagaacctcccaagattatcaagcttgaaatcttgattagcctatgctctgataccacttgataaaaacacgatagggatccgagcactactagaggaaatcaagaaacgtgcgaaagataaaagaaaaataaagaaacaaaaaataagacagaaattaaagatagattgaatcaagatactcgaaacaattatctaacgaagaactaatcgcctttggaagagacttaaaaacaaaaaatagattgtaaaacccgaccctttagaataacaagaacaacaataagcctaaaccttgaatacctagaagtgatctaagatttcgaaaaaggtttaatcttaccaccttaagttacgtcttgaaggttgaagaataaatccaagagtagccacacacaagagtgcaaaaaaaaatctcacaacttttattgatattatctataataatctaagtctaaaaacaaagaagacaccctttatatatagagatagggggggggggggggcacgaaattgtacttaaaaaataaggaaataaagtcctaaactactttggacaacaagtccaactaccttaggaaaaggaaaatactaggaagcaaaaaccaagtcattcttggaaagttattccaaaattcttagtaaaaggaaaacataatcttaactaactaggaaaacaataaatatagttccataatatatggaaataagttccaaaccaatcttggatagaatattggaaatcttgaaggaaatttgcaagcaacttgacaccaacttgcactcaacatctatcacgaccattgtacccttattggacatcaaataagtcttttgtatgctataaaaatgtgactttatgtaggacttcatggggctgctagtttggacacattttaggtgccaaattggtccaataatggcatgatttggaccttcttcagaggaagtttcttgggatcttatccacctcttcttggatatgaatttgggtcataaaaaataacacctagataactcgtatcatttatccttaagttcttcctcccaactaataacttctttgatcgctcctgaagtccaatgaccttgttttgcaactttttagcttgagatcttgttaaaggccttctttgagattccaaagtttcgtccgtgaatagatttgagcttcctaggattctatcagtgtccatgtttttcacattcatagcatcttccatcatttttatcattttcattattcgtccttcctttctgaagtttcatttacctctcctgctatttctgtttttcctcatcatacttgttacaacttgggagatcatggctatgttttcatcatgttctcctccttcctgttcctcttcattttctggttccaccacagttgctttaaaatcaatttttttgctttttttcttgttgaatctgccagtccaagtgagtttttcaaagacaattagatcacgtctaagttcatcataggacattttgtcaatgtcctgacattccagggcaataaccttgggctgccaaattgtgggtagacttctaagaatttttctgacctgttctccgctctttattggtctaccaaaagattttagatctccaaggattttgctgaacatggagaacatttcctctactgattctccatccttcatttgaaatagctcatagtcacgaactagaagattgatccttgtttcttttaccttgttggttccttcatatgttacctccaatttatcccacatttccttagcagtttcacagcttgaaatcttttcatattcttctccgttgatagcaatatacaatagattttttgctttggcattcacaattatgacatcggcttgttcattagtgtaataatctaaatcaagtagatcagttgatattaagacttgaacattctcatttttctttggcggaattggaagatttcccctttttatcacacgccaaactttggtgtcatatgacatagtgtatgtttcaatacgaactttccagtgagaaaagtgacgtccgttgaaatatgtaggtcgtacttgagaggttccttcttgaaataatgcaccgactatgtttgatcccatgatatttttctcactagctgttaagcaaagttctaagccttgctctgataccaattgaaagtgcaagacgggagaggtgaattgtggttgattaaaaacttagttgactaaatataagtttagtcgactagattctgcacagtaaacacttagagagaaatgaaccaagcaaactgaaagataacaagacataacaaatttgatacttgttacaccccatgtgtttcgtacatgaaagtacgccataaataaattgatggaagctcggaaatgagatattacatcccgcattttcatatgttaaggtttctttgtaagttaatcgcgtacgttcgacaatgagattattttgagattataagtatatgatatttcaaacaagcgatgagtaaattcgtgaaggtgagagagtaagaaaatcgaaaaaatgaatttcgtcatagtttgacgttttgggataaaatacggcccgagctaaaatacccggtatttatggacttgtgccatacaaggtattacatgaccatgatagtaagatatataaagtgtgttaaaagtaagtagtattttaagtaattcgatataatgcttaattatgtgggtaattaattaattattagttaatgggaaattaactagttaattaaggaattgttgggtgattaattcaaatctctgggtaaagcttgatgaacccacgtggcagcaagtaaaatgagactcaaaaatcaatttgtgactcttaaaataggttgaaaggtcatacatttaagagaattatatggcaagtcttgaaaggtgggccccgcaccaccaagacttaaatctcttctctaattcacaaatagagatgtattacatctaagttaaagagaaagacttcagcaagatgggaatttcattagcaacgtgagttgcttcaatcttccatccaaaagaaatttcttaatattatagcaacgtgggatttgcgattcttagggagtacggtgcaagttttctcaagaatatcatacggattttttcctacttaaatccgctgttacatgttgtcgcaattgcgtgttaaagggattgtaaagagaattggctcaggtatgttaagtctatcccttctttctttttggcatgattcatacgatacaaacaaaacgagaaaatgcacaacttccataaatgactctattcatagaaatgctagagatgcttatgttcttgattccccacgtatcctttattctatcatctgttcatgggtatcagaaaatacgtaagttgataaagtttacttcatgatattgatcaaaggcataatggtcttataacactgcgaacgattctattgacgtgcttctcttgcattgcattcatttatacatgtccattgactcatgaccagatggcgttatatacgcgtatatatatatatatatatatatatatatatatatatatatatatatatatatatatatatatatatatatatatatatatatatatatatatatatatatatatatatatatatatatatatatgtatgtatgtatgtatgtatgtgtgtgtgtgtgtttatatatatacacattatttgttgatacattatacattatatatacatcgatgattgttcccaaagtggccgagatgatatgatgggatgccctcagaggcttgatgatgttatgaacagatgtaccacacatgacattcatacgcatatgcatgtcactataagtatttcatgatttacagagttatccagacgtataggttgagtcatttactccatgtttcttccatgtctttatatacttatttatgcgccttacgtactcagtacattattcgtactgacgttcttttgcctcgggacgctgcattcatgcctgcaggtatggataatcagtttgaggagccctcattatagacgaggttagcattcggcgaaggatcagtaagactccacctcattcgaagtagtctatgagtcaacgtgtcagaattttgctatagacttatgggtaggccggtacccgatttgatgtcaaatactcttagagactttgtagacaaatgttcattttgtacagtatgtcagaggtcttgaaggcccatatgtgttcatgttttatttttaaaaaatggttcaatgatacagtgctttcccacttatagttatacattacgagttgtggccatgttggcccatttgccaatgagagtacgataagaaagatattaagacatgaggtgcccatcgcagcccacaggtttgggtcgtgacaaaagtgttatcagagccaggttctgtcctagggagtctacaagccgtgtctagtagagtcttgtttatgggtgtgttgtgcaccacacttataagtaagaggatacatggcatttaggactgtcactctttcttcctactctagatcgtgtggtagtgctcatttgtaagaacccaatttcctaaactctatcttactcataatacgacgatacctacatcaagaaagacggttggtaagagatatagctgtagaagagctgagtaagaggaactcgatttttgcatcatgcttatgatgagtaaatgtaaggtcttcagcatatcatgtgtgtataaggatccttaaggcaaaaatatctatccacccatatggtgaaaagcaataggagatttaggagatagatacaattttcaacaagtaaaggaagcaaggtgaagaagggaacgaggtaccaagtgagtgaagatgatcattatctaaaattcaagaaaagagatataagcattttgagttaccttcgacagtaacggaggtatgtacaattgtccacactgatttcagttatgccctatgggagctagcagatatggtttaagacaagacgtgatatcaggatctggctggggttagagtaacccaaaatggtgaatggactgtttgtgttgacatttccgaaggatgttacaaaggtgctaatagatctccttgtgaatcacccagatggtgcactctaaaatagaacaactagatacgagtactacaaagataggcaccagaagtcttgaagggtatattaccttagtgtggctcccgttcctataaacagagaatgttaggcaaccggaagagctagtggatggagtaagaggagctagaagcaagagaatgccttgttcgagttttcagaataaagtgaaagacataaatgttagcgggaaataagaaaagagttaatgaagcattatgagtaagatatgctacagttaagtgacaacagtagatcaaaagatgacagtattacaaagtctatagttaagtgaaggaaaagttgagaggtgacatgccttgagacaacaaaagagtataggccataaagtcatacttcattccgagaaataagttcgtgaattttgtgattaccagaaggaaacgttaggccccagagtaacgaaaatctataggctgctgaacaaaacacgaattagggaccgagtgatttgatgatagccggcatcatgagaatttcaaagattgtgttccggcaataatagaatggacgacagaagaataatctttaaaggtcattcaggaaaacgtttccctaaagcaagcaatatgagaaaagttaagcttaagggactatgtgtgccagttacactaagtgtcactctcgtgagtaaggaaatttgttatccttggtacagaaggattacggcaaggcgaggaagggtcatcgatgatgtgaaaagacgccaaaggtgaagaggtaaaacatctataagtaggtcgtcgtggctcctaatcttagtacttccctaaagggttaaatgaaaaagggattaaattggacttattcagatcctacatatatgctactattccagaatattatgcaaatacgacgtcaaagagaggaagtaagggttcttgcccgagttgttattgatggataaggagccagtgcgagacgtaatttaagacaaaggaaataacccaagaaagattacgcggaatattgatatgagaatgggccaacgagtagttagtaactgatttaagaagagcctagttatggctagacaagaggatacggacaaatcaacagatcgtgcaagacaaacatagtgaaacccaatctagtgaactcagcctcataataatgtcattgtaatacttgagatatattcagataggagtcggggtagttaaagctatcgtatgaatgttacgggaataaaagagagtgccactgggaagacatacaaaatattagtttagaagcaaccctacaagcacaagggtgtggaggtaagtaattacggataattataagcaaggaaagacatcaaagatccgtaataagctcacatctttacaagagtcagagggtcctccctaagtactacaatgaaagtctagccgaggaataaggaagaaggcttcaacctaaatctagtaacttgaaggataaatggtcatgtaaaaatagtctcactacaaaattgtatgcacgccaaaagaaagtggcacctaccgtggctaatggacgggaagaagaaaaaaatcaaaaggtgatattcaagatcatatgggtatggcattccaatatgtgtgggcactaagataagctaagtacgcactcaacaagggggcagaaagctgagaaggagcgaaaggaattattcgatcaattatccaaagttagttaccttaacaacacacttaagatttcagagtatcatccatgaagcatatatgttgacaatcatacagccgtataagactccgatacaagttaaaataaataattgagtccaagtcatagacaaaggattaaattgttagaagattgtatcatggatatttcatagcgcccatgaaaggctaaagtaatagctaataagatgatccgtatatcggaaaatagcttaagcctatataaaggctcatcagaaggaagaggaaactaaagagttacatcaactaagtaaatcacgagtctgattattggacccagaaaattattgacctcgtgattgagaacattgcaggatcactcttaaatatcagaggtacaagagatatagtacagtatccatattctataatggctctaagatagagccagttagaagagtaccgacctcataagaagtcagtatgaagatctcaccggattgtgtatgctccagaggtgcaagtagtataatagagttttaagttgtggatgtgaatcatacctatattgaagggggggggggggggggttatgtaagagatagaagttacgatgcgagatatttacgtaaggtaaaggtgagtaacatacgagatactcaggtgtagaaagttgtgaataatctatacttcagatagagggctagaagcgctgggatttagtatccaggaatgatagcggcgtcgtaagtggcatatcttccagcctatggtttctaagtatcgagaggtctagttacgagactaaaagaagagttagagacaatgtggtttctcgcttgatgttccagaataacataaggaaatcagtcgaaagctaaagcatggtaaagctacaaggttgtaggaagataggagcaatgataaagaaatggcgagtgagaaggtgacaagaatggataagtcctcaggattaagcccatgaaaacaagagagctaatggtttctctaagttatagaaagctcagtatagcttgaataaactcaagggagtttctcatcataagtagcatttagaagagatgtaatgctgccctgatagtagaataagagtgtacttataatggataaagaatgacatttaggccttcgattgaataatgatttgaagaaaaaaaaagaatgagagattcatgaattgtacgggattaaacacccacataaggtgaatcatattgggatgctatgaaatacggttattgaagtacagtgtctcccctaggtggaccagtctaatcatttcagaagttacccgatgagacgtgagccctagcaacagtgttacataagaggtcaagttatcaagtggtagattgtacatcaaaattgaggtgaatcaacaatggatggataaaagttacaaagtataagatgagaataggccatcattcttaagatgaacagtaatgaaaaagcattaaggacttacatttatacatataggataagcaacgagagtaacctagagtttggtagcagacctcagtatcgaaaaattgaagaaagaattatggtattttatgatctacctagatgtagtaaagtcagatggataaatagatctatgaaataaggtatagcaatatttgtaagttcaacaaagtaccaagtgaagaacttcagcatacccatagatgcccagagggacatcttataaagctctgtatatgtttacaaagtgaggcctagagattagttaaaagatggaggaaaaaggagagaagaatcgcataggcgcacatacaaagttagagtcgtacaagctgcatgatagaaggtagtaacaattatgagattagaaggattacgactacaagtcgtggtgtgagaaagattcttaaaggggggaatgacttgtcctttggaattattcacagaacagttgcctagatggcaagaagattactaaagtattcagaagacataggttatgaaactgataagtgcatcagtcaacattcgaggatgaatgttccaaagaggggaatgatgttacaccccatgtgtttcgtacgtgaaagtacgccataagtaaattgatggaagctcgaaaatgagatattacatcccccattttcgtatgttaaagtttcatcgtaagttaatcgacgtaagttcgggaatgggattagtttgagattataagcattatgctatttcaaataagagatgtataaattcatgaaggtgagaaggtaaacaaatcaaagaaaatgaattttgtcaaaatttaacattttgggataaaatatgggccgagctaaaatactcggtatttatggacttgtgccatacaaggtaccgcatgaccatgatagtaagatatataaagtgtgttaaaagtaagtagtattttaagtaattcgagataatgctaaattatgtgggtaattgataaattattggttaaccggagattaactagttaattaagggattgttgggtgattaattcaaatctttgggtaaagcttgatgaacccacgtggcaacaagtaaaatgagactcaaaaaacaatttgtgactcttaaaataggttgaaagggggcacatttaagagaattatgtggcaccaaatcttgaaaggtgggccccacaccatcaagaattaaatctcttctctaattcacaaatagagatgtataacatttaagttaaagagaaaggcttcagcaagatgggaatttcattagcaacatgagttgcttcaatcttccattcaaacgagatttcttaatattataacaacgtgggatttgcgattcttagggagtacggtgatatcattctcaagaatatcatagggatttccccctatatcgattcgtcgttacatgttatcgtaattgcgtgttaaagagattatcaagagaattgactcaggtaagttaaggctatcccttctttctttttggcatgattcatacgatacaaacgaaatgagaaaatgcacaacttccataaatgactctattcatagaaatgctagagatgcttatgttcttgattccccacgtatcctactattctatcatctgttcatgggtctcagaaaatacgtaagttgataaagtttacttcatgatattaatcaaaggcataatggtcttataacacttcgaaagattttattgacctacttctcatgcattacattcatttatacatgtacattgacccatgaccagatgacgttatatacgcgtatatatatatatatatatatacattgatgattttgcgcacaatggccgagatgatatgatgggatgccctaagaggcttgatgatgttattgtcacgacccaaattcccaaccgtcgggatcgtgatggcgcttaacgccacacttgctaggtaagcctatgctagaaatcaactaaccttttcttttaaaatcttactcaaatataacagaacaacttaaaataaatgatgaatctaatatttcccaataaatgactttgtgaataaacttggatataataaaaccgaatcacgaactaaatataaactacccaggttctggtgtcacaattcacgaacaactaagaatactacaaataatgggatgaaataatgtatctttgtttgaatgaaataaagcaatgtctatataaagtaaagagaagactctaggaatctgcggacgccaacagatctacctcgtgtctccgagtaaatggtgacagctattacaatctcctaactttggctggtaccttgatctgcacaaaaagtacagagtgtagtatcagtacagccgaccccatgtactgagtaagtcctgagcctaacctcgacgaagtagtgacgaggctactacggggcatttataacataacttgtgaaccatatataataaagcaggaaaggaaattctaaactacacgaaacaataatctgcagcaataaataaaattaactctgcctcttttccaggtctcagctataaccaattctcacataagtttcaaaattttcaaatttcactttaaaataaccataagtgcataatatgataaacagtaaagtaaaacagtaagttttcaaatccttgtgtttaaaatcagtaaaacgtaaatgttctcccttattgctccttgttgcggtgcgcagcccgttcccacctgtcctcccttattcctcctccctatatacatatcacccttatttctcctattgcggcgtgcaacccgatcccacatgtccacccttatcactccttgttgcggcgtgcaacccgctcccaccagatagtcacgtcattttatttataagagatttcacaattcaagtcaatgcctttcacaataattttgtctcaacaattgtaaacagaaaattgtactgctcataagcttcatcaatcattgtttcacagtgaaacaaaccggaatatattaatatcgtagaatactgtcaacttgctcaacccttcacatgtcacaatgaatctaaggtaacaaccaacacttctaatttacttgaaacaatacttaacaacaagttgatgaaaacaagtagacatggaggcatagaaatcatgcatacaattaagccaggaatcaaataagttgggtatagggaagggatcatgtttaacaattaatttggtggtgcatagatacccgtcacctcacctatacaccacacgcatgcaaattctacatagaaattaggttggggattcctattccctcaagccaaggttaaaccaagcacttacctgaattcagcaggccactcactgctcaatcatggattttcctttcgaatttgacttcaactcactcgtatataattataattgagtttaatatcattaattattgctaaaggaatcaaatttattgaaaaattatggttttcctaagttttcccaaaaatccctaattctaccatgaacaattctagattctaggttgaaatcttgtaaagtagttaaagattgaaagagatgagttagaaatcacttacctatgattgggggaagaaagtattttggaaaaatcacctcttgcgttctaaggttttattatttttgaaaagtggtaagataattaaaagtcccgtatttatacacgcgcatcaggcccgctctgtcagcggaataattccgctacatcggaattctgggccttgccccaccgctgtcagcagaatttggagcgcggcggcgggaatgtggattaaaaatccgaggtcatcagaattcggggcgctgcagtggatcctgttccgctgtcacggaattctaagcgttgtcgcgcttccaggttcagagacctgcaacctgcaacttttgaactccagtatttttctaagtctcaaaacactctgtggtctactcgaaactcacccaagccctcggggatccaaaccaaacatgcacgcaattctaaaaatatcatacgaacttgctcatgcgatgaaatcgttgaaataacatcaaaaactacgaatttaacctcaatatcaagatttcctcaagaacactttaatttcactatatctcaaccggacgtccaaatcacgtcaaatcaatttcgattctcatcaaatttcacaaatacgactttcacattataacaaatctgtaccaggctccggaaccaataatacggacccgataccaatgagttcaaataataatcaattctttatttcctttaaaatttaaaaaaaaaaaattgttttctaaggctagggactcggaattcgatttcgggcatacgcccaagtcccatattttactgcggaactctcggaattgccggaacacaggcccgggtatgatttctcaaaatgttgaccaacgtcaactaaaaaccaaaaatttaactcttaaaattactgtttctcatattttgacataaaagctttccggattcacgcccggattacgcacacaaattgaggtgaacaaaatttagtctttttaaggctagtaagcctggaatagagtcttaattcattagatgactctttgggtcatcacaatcttcacctctaaaacaaacgttcgtcctcgaatggacatagaaaattacctgaattggcaaataagtgtggatatctactctgcatgtctgactctgactcccaagtagctgcctcaacgggatgacctttccgctgcactcgaactaaaggataactcttttggcctcaacgacgatctgccggtctaaaatggctagcggctcttcctcataagtcaaatctttgtccaattggacaaaaatgaaatctaacacgtgagattggtcaccatgatatttccggagcatggatacatgaaataccagatgaattgaggataaccctggaggcaacgcaagtctataagctacctcccccactctctcaagaatctcaaatggcccgatatacctagggctcaacttacccttcttcccaaatctcataacacccttcatgggcgatacccgaagtaatactctctctccaaccataaatgccacatcacgaaccttacggtcggcataactcttttgcctagactgagttgcacgaagtcgatcctgtataatcttgaccttgtctaaggcctcttgaactatgtctgtacccaataaccgaacctctcccggctcaaaccatccaactggcgatctacaccatctaccatataatgcctcataagaagccatctagatgctcggctggtaactattattataggcaaactccgctaacggcaataattgatcccaagaacctccaaaatcaataacataagtgcggagcatatcctctaaaatctgaatagtacgctcgggctgcccgtccgtctgaggatggaatgttattctcaactcaacccatgtacccaactcatgctgaactgccctccaaaagtgcgaggtaaactacgtacctcgatcagaaatgatagacacgggcacacggtgaaggcgaagaatctctcgaatatatatctctaccaactgtgccaaagtatacgtacttgccactggaatgaaatgtgttgatttagtcagcctatccacaataacccaaatggcgtcaaacttcctctaagtccgtgggagtccaacaacaaagtccatagtgatgcgctcccacctccactcaggaatctctatctgctgaagtaaaccactgggtcgctgatgctcatatttcacctattggcaattcaaacaatgagccacataagcaacaatatccttcttcatccttcgccaccaatagtgctgccgtaggtcctggtacatcttggcagcacccgggtgaatagaatacttagaaccgtgagcctcctcgaggatcaactcacgaaggccatcaacattaggcacacatatacgaccctgcatcctcaaaacatcgtcatctctaactgtaaccttcttggaaccaccgtgccgaactgtgtccttaagaaccatcacatgcgggtcatcatcctgccgatctatgatacactcaaataaagaagaccgagcgactgtacaagctagaacactgctgggcgaatatccaacctcacgagctgattagccaaagtctgtatgtctgaagtcaacggtttctcaccgactggaataaatgcaaggctgcccatactcaccgacttcctactcaatgcatcgaccaccacattcaccttccatagatgatataatatattgaaatcataatccttcaataattctaaccatctcctctgtctcaaattaagatccttttgcttgaacaagtactggagactgcgatgatatgtgaaaacctcacacgacacacaatagagatagtgcatccaaatcttcaatgcgtgaacaatggtttccaactctaattcatgaacatgataattcttcttatggactttcaactgtcgagacgcatatgcaatcaccctgtcatcctgcatcaacactgctccaagcccaatacgggaagcatcataatataccgtaaaagatcctgaacctgatggtaacaccaacactggtgctgaagtcaaggctgatagaatccaatgaagctcaaatctattcaaggacaagaatgaatcgttggaatctcaaaaagggcctttaacaagatgtcaagctaaagtgttgccaaacaaggtcattagacatcaagtgcaaataaagaagttgttaatttggatgaagagatcaaggataaaggatatgaattggctagatattacaattgttttatgtcgcaaatttatgtccaagaagaggaggattggaacccaagagacatcttttgaataaggtcatagtcagtccacttttgagccaatttggcacttaaaatgtgtccaaacttgcagcccatgaagtcctacataaagccacgttttcatagaataaaaaggacttaattgatatccaataagggtacaatagtcttgctagatgttgagtgcaagttggtgccaagttgcttgcaaatgtccttcaagatttccaagattttcaagatactatccaagattgggttgtgacttatttccatatattaggggactatatttattgatttcctagttagttaaggtaattttttccttttcctaagatgttggaattactttccaagaatgacttggattttgcttcctagtattttccttttcctaaggtagttggacttgttgtccaaagtagtttaggactttatttccttatttttttgacttgatttcgtgaccccctcctacctatataaagggtgtcttatttgtttttggacatagattattatagataatatcaataaaaattgtgagatttttcttgcactcttgtgtgtggctactcttggatttattcttcaaccttcgaggctcaacttaaggtagtaagattaaacccttttcgaaatctaagatcacttctaggtattcaagaaaggtgataagtttaggcttattgttgttctttttattctaaagggtcgggtttcacaatctatttctttattttaagtctctaccaaaggcgattagttctttgttagctaattgttgttgttaggattcaacttcaagaatagaattcttgaattcatgaaactttttcttgaattcaatctatctttaatttttcgtctttttttttttgtttttttgtttttttttagcttccgcacgtttcttgattttcttgagtaattgttggacccctatcgtgttgttatcaaaggcagtcttgagcttctgaaatctcgcctcacactcgtacgaacatttgaatggggcacctatctgagtcaatttagtcattggggttgaattagatgaaaacctctccacaaaacgacggtagtaacccgccaaaccaaagaaacttctgatttccgtgactgaagtgggtctaggacagttcttgactgcctctatcttcttaggatctactcgaacaccctcttctgatacgatatgacccaagaaagctactaaatccaaccagaattcacacttttaaaattttgcatacaactgattatcccccaacgtctggagcgttatacagaggtgttgttcatgcttctctcggttgcgggagtatatcagaatatcatcaatgaacacaattctgaaagaatccagacgaggcttgaaaatttgattcatcaagttcataaaggctgctggagcattagtcaacccaaaagacatcaccagaaattcataatgcccatacctcccccgaaaggctgttttaggaacatcggatgccctaatctttaactgatggtaaccagatctcagatcaatttttgaaaacacactggcaccctgaagctgatcaaataaatcatcaattctcggcaataggtacttattcttgatagtaactttattcaactatcggtattctatacacatcctcatcgatccatcctttttcttcacgaacaggactggtgcaccccagggcgagacattgggtcggataaaacccttatcaagaaagtcttgcaactactctttcaattctttcaattttggtggggccatccagtacggaggaatggaaatgggttgagtgcatggagccatgtcaatacaaaaatcaatatccctatcggttggcatccccggcaggtctgcaggaaatacctcgggaaactcgcgaacaataggcaatgtatctgtggaagaaacttcaacattagaatcacgaatatgagccaaataagccaaacaccgcttctcaaccatgcgacgagccttggcataagaaattactttgttgggagaatgaccaggagtctaatcgaggcaaccctggcaagggtaacgtaattgtcttggcgtgacagtccaagatggcataataaggtaacaaccaatccatgcccaaaatgacgttgaaatccaccatgtcaagaagcaggaggtctacactagtttcaagaccctcaatgactactacacacgagcgatacacacgatatactacaatagcatcccccaccggtatagacacataaacaggaatactcaaggaatcacggggcacaaccaaatacgaggcaaaatatgatgacacataagaataagtagatcccgaatcaaacaaacctgaggcatttctattgctaactgaaatgatacctgtaataacaacatcggaggactccgcctcaagtctagttgggaatccatacagtcggggctgggctccaccaccatgaactatgtctttgggaggacctctgataggcggacctccacctctagcgggctggcctccacccctagcggcctgacctccacctataataatctgccccctacctcttgctacttgacacctacccttggctggctgggcagatggtgcttgaactatagcacaggaaccctggtagtgatgttgattcccaaaattttcagaaaagctcttcgaacatgcccatattcaccacactcaaagcatcccccctgatatagagactgacccttatgagccggctgacctcgataataactctgcagcggaggtgctctaataggagctgatggtgcactgtagactgcctgagtagcataaggcatataagaaccacaacttcctgaggcaccacgtgaagcctgaagtgctgaatgaatggcctggaagtttggcctctgctgaaattaacctcgcctccagatgaggcaccactaaaaccaccggaatggcgaggtcttttgtcttacccctgacctcctatctcgagaatcgtctcaactctcctggccacattatttgcatcttgaaatgatatctcggtccttgtctcttttgccatctgcaacatgatgggatgagcaaggacctcaataaatctcccgaccctctctctctctctgtgggtaacaaaagaatatcatgtctagccaagtccacaaaacggttttcatactgggtcacagtcatgctgccctactgaagttgctcaaattgacgttgattctcttctatagtagtaacaggaaagaacttctccaaaaagagatgtgaaaaaggtgacccagctagtctagttaacaaatagtccctccaccatttcttgacggaaccagtcatctgaaaagcagcgaaatcgaccccattggtctccaaaatgcccatattccgtagaacctcatgacaactatccagatattcctgagggtcctctgaagtagcaccactgaaatggacaaggaacatcttaatgaacctgtctagtctccacaaagcatctgatgacatagtttccccatcaacaatcggcgctacagcaactggctgaattaccctaaccggattggctgctggggtctggacctgaggagtaatttgatcacgagtgtgggtagcaggagtttggacccctcctccagcctgatatatggatgctaccacaaggagtgtgcctgtctgggctacgctctccacaaggcccactaatcggaccaaagatcctgaagcaccggggtagcaataaacccctctagcacttgagatggtcccgctggaacaatctgagttggaaccccctcattaatctcaatctgaggctccgcaactggggctgctgtatgagcaatgtgctgagtcctacccctgcctcgacctctgacatggcctcggcctctgcccctagtaggaactgctgctgctggaagaccggattgttgattagcagaagaaaaagcatgcattatcgagagtatagaagagtctgataagtattttagatatcaagaatcgcacaatagactagatataaaattgagttttgttcctaactttatagcctctgagagataagtacagatgtctccgtaccgatccttcagactctattaagctcgttcgcgaattgtgagacctaagtaacttaggactctgataccaacttgtcacgacccaaattcccaaccctcgggatcgtgatgacgcctaacaccacactttctaggcaagccaacgttagaactcaactaaccttttcttttaaaagtttactcaaatataacagaacaacttaaaataaatgatgaatataatatttcccaagaaatgactttgtgaataaacttggatataataaaatcgaaccacgaactaaatataaaactacctagggtcatgtgtcacaattcacgagctactaagaatactacaaataatgggctgaaagaatgtatctctgttttgaatgaaataaaatagtgtctatataaagtaaagagaagactctaggaatctgcggactctagcagatctacctcgtgtctccgagtaaataatgacagctactaaaatctactaactctggccgatacctggatctgcacaaaaagtacagagtgtagttttagtacaaccgaccccatgtagtgagtaagtgccgagcctaaactcaacgaagtagtgacgaggctacgacgaggcatttataacataacctgtgaaccatatataataaagcaagaaaggaaattataaactaaacgaaacaataatctgcagcaataaataaaactaactctgcctcttttccaggtctaagcttagccaattctcacataagtttccaaattttcaaatttcactttaaaataaccgtaagttcataatatgataaacaataaagtaaaacagtaagttttcaaatccttgtgtttaaaattagtaaaacgtaaatgttctcccttattgctccctgttgcggcacgcaacccgctcccacctgtcctcccttatttctcctacctatatacatatcacccttatttctcctgttgcggcgtgtaacccgatcccacctgttcacccttatcactccttgttgcggcgtgcaacccgctcccaccagacagtcacatcattttaattataagacatttcacaattcaagtcaattcctttcacaataattttgtctaaacaattataaactgaacactgtacttctcatatgcttcatcaatcatcgtttcacaatgaaaccagtcgaaatatatcaatatcgtagaatactgtcaactatctcaacctttcacatgtcacaatgaatctaaggtaacaaccaacacttccaatttacttgaaacaatacttaacaacaagttgatgaaaacaagtagacatggagacatagaaatcatgcaaacaattacgccgggaatcaaataagttggcaatagggaagggttcatgtttaacaattaatttggtggtgcatagatactcgtcacctcacctatacaccacacacatgcaaattcacatagccatttggttggggattcctattccctcaagtcaaggttaaaccaagcacttacctcaattcagcaggccactcactgctcaatcacgacttttcctttagaattttccttcaactcactcgtatctaatcataattgagtttaatatcattaattattgctaaaggaatcaaatttattgaaaacttatggttttcctatgttttcccaaaaatccctaattctgccatgaaaaattctagattctaggttgaaatcttgtaaaaagtagttaaggattgaaagagatgagttagaaatcacttacctatgatttggggaagaaattatttttgaaaaatcgcctcttgcgttaaagggttttattatttttgaaaagtggtaaaataagtaaaagtctcgtatttatacacgtgcctcaggcctgttcaccgttgtcaccggaataattccgctacagcgcaataattccactacaatggaatttttggccttcccaccgctgttagtggaatttggggcgcggcggcgagaaggtgtattaaagatctgcggttagcagaatttcgagcgctgcagcagatcctggtccacgaccacggaattccaagcgctgccgcgcttccacgttcaaagacctgcaacctgcaacattttaactccagttctttttctaagtctcgaaacactccgtggcgtactcgaaactcacctgagccctcgaggctccaaaccaaacatgcacgcaagtataaaaacataatacggacttgatcgtgtgatcaaatcgttgaaataacgtcaaaaactacgaatttaacctcaacatcaagattttcctcaagaacaagtttcactatttctcaaccggacgtccaaatcacgtcaaatcaattccgattctcatcaaatttcacaaatatgactttcacattataacaaacctgtagcgggcttcggaaccaaaaatacagaccgggcatttttggcctaagaatccttgctggttttctgttttttcctcagcagtcttttcttaattgcgatagcaagaattcatccgcgatcacataaggtaagaagggggaggtctgcgatttgttctcctcgatcgcaagtcgaggttcgcgatcgcatagttagagcagccaagtctcctcgatcgcataagctgtgtcgcggtcacatagaacccttaggcaggtggaccttacccttcgcgatcgcttgagtagtgatgcaatcgcctaagtctgggtcttcaagattcgcaatcgcgtgttggtttctgcgatcgcatagcttgatccaggcgcgtgttcctttactctccgtgatcgcgactctatgtacgcgatcgcataaggcaaatacctaggcagtctcttaaagacccaaatccgagggtttatgttattttcaccattttgaatttgagagctcgggaggggcgatgttttgaggctttttgcacctgggtaacttgggtaagtgttttctatccatcttagatcaatttccatgattccaatcttagattcaacctttaatttcgaaaattttgggtagaaaatgggaaaaatgagttgaacttcttagaccgaattattgagttttgattggatatttggcctccaatttcagagattcttatgtggttagactcgtgagtgaatgagtgtccggaaaatataatttttacccgattccgagacgtgggcccgggggactttttgggcgaattttcctaatttcgcgtattagcttcgaacttatcagttatttcgtttccttgaagtcatatttacattatgcaatcgaattgaatagatttgggccacccagagttggatactcgtggtaagagcgtggtattgagttgattagcacagtcaaggtaagtggcttcttccctaactctgtgttggggatttcccttaggcatttttatactgattttgttatgtggacgccgtgtatgtaaggtaacgatacgtacacgagtcattgttgctaaaattctacttttctttccatgacataactcattttcattactataatactgctttatgctataactgagcggttagcatatgaataagcatgtcaacctgtccttacttaaattcctcttatttgctactaattgcaccctgcgtaggtagttttatctgattcttggctgttgttttcttgaactgttttattaaaccgtatccgatagatttctgcattgcatatttagattgggactacggaccgagatccgggagctttccccctgtaatgcatcgcatatttaaattaggactatggacctcgatccgggagctttcctctttgtactgcatagcatatttaaattgggactacaaacagagatccgggagctttccccccgtactgcattgcatatttactgttgagatatatgctgtgctaccgagagctatctttctttcattattcctttatgtttccgttaattctgttcattattgcttatttatattctctacttaaacttataactgacttattttaaaactcagtagagcctcaacctgacctcgtcactacttgactggggttaggcttggcacttactgagtaccgaaatggagtactcacatcctttcctgcgcatgttttccccatgtgcagatttaggtaccagtacacagtattgtggctaggcgcatcttagaagctactcaagagaccgcaaggtaaattctgccgcgtccgcagaatctcacgagtcctcttcctactataatatagacataggggatatagatacatatatacattttcttcattcctttgtatagatctatggtagtacggagcttgtgatttgtgacattacgagttttgggaaagtaaaagttgtagatgtcgagcggctaaattttatagtattacttcttctttactatttctgttattattttgtcttatttttcgcaaatttaggcttacctagtcgtagagattaggtgccatcacgagatcgttcggagggttaattcgggtcgtgacaagttggtatcagagcgtctaggttcataggagtcataagttacgagccgatttattagaatctcgctgatcggtgcggagacgtccgtatctatctttgagaggctatgtaactgttaagaacagtcatattctttggaattccttatcgttctagttattgtcatcaaaactcttaaactctattctattcttgcttacagatggttcgtactcgtaccggacgtactgatgaccaggcacccgagcccgcagccagagccgtcagaggtaggggtcggggcagaggaagagcacgccgtgcagcccgaaatgaaaacccataaacaactcccaaaaccggtgtcacatactcatggactatttatgagattactacaaacaaaaggtctgaaataaatacataaaactgtctttgaaatacaaagtaagacagagctgaaagtggaaagtagaaggtgacgtcaaggcccacgaacgtctgcggacctacctcgagtctcctgtgtgactgaatgagatgctccgatcgtcagtgatctccgggtccggctgcgtagtctgcacaacataaagaagtgcaggtgtagcatcagtacaaccgaccccatgtactgagtaagtgtcgagcctaacctcggcgaagtagtgacgaggctaggaccaacactacatatgtacctgtgcaattttatataataacacgaagaatggcaacagaaatagcaagtaagacagatacgaggagaacatgctggggagatagggtaacagtatgctaacacagcagtacaaggtaataaatgaaacgtaaaggcaaggcagaagtatagcttctcaaacatataatgaacaggaaaggcacgaaatgtcccctcgtgcataacctcacaatcactcggcacgacatgtcccctcgtgcatatataataacactcggcacagaattacccctcgtgcataacctcacaatcactcggcacggcatgtcccctcgtgcatatataataacactcggcacggaatgtcccctcctgcataacctcacaatcactcggcacggcatgtcccctcgtacatatataataacactcggcacagaatgtcccctcgtgcataacctcacaatcactcggcacggcatgtcccctcgtgcatatataataacactcggcacggaatgtcccctcgtgcataacctcacaatcactcggcacggcatgtcccctcgtgcatatataataacactcggcacggaatgtcccctcgtgcataacctcacaatcactcggcacagaatgtgccatcgtgcatatataataacactcagtcaacacggcatgtcccctcgtgcaacgaataataataaaaaacacaaggcaacaataatgtgaaaatcaacaatacaaagtctcaagtgcatggaaatattcaatataattcccttgtcccagcaaggagaattcatcaattacaatatcaacaaatgcctgacaagggtctcagctataaccaatctcgcatcagaaatacaatttcaacagtgtaagactcaactggaacaaataactcgataactctccacgtcatgaaacaacatcaagcatcacttttaattcataatttactcatagtgcggggaatattaggaacatagcaaatttcatcacaattgactcacgggcatacttgaccacaacgcataggcactcgtcaccacgcctatacgttggacatgagttgcacatagcaaataagactctatacctaatccctcaagctgaggttaagccaaacacttacctcggctccaaaattgcaagtcaaacctcgatcacaacctttcctttagaacccgaatccggaacggtattatctagacataatcaacccaagtacatcaataagtactcaataaataaatttctaagccaagttatgcatttcctactattcttccaagaatattaaaattcgaccccgggcccacacgtttagattttcgaaaattcataaaggaatcaattacccggagtctaaggatcgaagttatgtaatttaatcaagaatttctggcctaacatggaaaatcacgaaattcctaaaaaccctaaagtttactacctaattcaatgattttaggtggtttattagtgaattaagctaggaattattgttaaaattagaagttttatggggttttacttacctcttacagtgggtggtcgtggaaggtgatgccccaagcttggatgctctctaatggagtttgaagatggaaggaatgaggaaaacccgaattttggacattttaagtgggttgccaacaggggtttccgcacctgcgaccataggaccgcaggtgcggtctcgcacctacgagaaaaggatcgcaattgcggaaaagggccttagaccctgggctcgcacctgcggggttgggagccgctccagcggtcttgctcctgcagaaatctggtcgcccctgcggaaagggtcgcacctgcgatggcctggaccgcacctgcggtctcgctcctgtggcctgagtctcgcgcctgcggactttggccaaagggctggggttcgcacctgcgaggctgagacagcgggggcggtcccgcacctgcggcttggcaaccgcacctgcggtcacaccagctgctgtgcaccagcagttgtttttgctggtttttggcctcgcacgaggtccgggaggcacttgggcccatccgagctcccgtccaaaaataccaacaaatcccaaatcattaaacggactttctcgagctcacggaacactcaatacaacgctaaaactcaaaatcactctccaaaacccctgaattcaaaacttaagaactttgaaattctagaattcactttaacgcgtcgaaccggcctaaaccactcggaatgacttcaaattttgcagataagttataaacaacacaacagaactattcccggcctcggaatttcattgggacctcgggaacataaaatcacttctcaagccacatttcaaattctttagaaacctcacaagttcattaactctattttcctcacttggacccgaaaccaatcaaattcgattccgggaatacgcccaagtcccatattttcctacggaccctccgggaccgtcacatcacgagtccggatccgtttaccaaaaatgttgaccaaagtcaactttattcaattattcaattcaaaaatcccatttttatcaaattttcacatggaagtttcccggctacctgcctgggctgcgcacgcatattgaggtgagattaacggaggctttcgaggcctcggaacacagatttaactggaattactcatgatgaccttttgggtcatcacaatctctacctctaaaacaaacgttcgtcctcgaacggatatagtaaagtacttgagtctgagaaaagatgggggtaacgactcctgatgtcagactcggactcccaagtagcttcctcggcaggttgacccttccactgggcgaaggataacttttcgccctcaactggcgaacctgcctatctaatatggctactagctcctcctcataagtcagatccttgtccaattggacaccgctgaaatcaagaacatgagatggatctgcaatatacttccggagcatggatacatgaaacacgggatgcactgcggataaatgcggtggcaaggcaagtctgtaggccacctctcctactttatctaaaacttcaaatgggccaatatacctagggcttaacttgcccctatttccgaatctcatcacgcccttcataggcgacactcgaaggaatacctggtctcctaccataaatgcaaaatctcgaaccctacgatctgcatagctctttttcctggactgagctgtacgaagcctatcctgaataatcttcaccttatccaaggcatcctggactaactcagaacccagtaatctagcctctccgggctcaaactatccgactggtgaccgtcatcgcctactatacagcgcctcatacggagccatctgaatgctcgactggtaactgttgttataggcaaactctgctaagggcaagaactcgtcccatgaaccaccaaaatcaataacacatgcccgcaacatgtcctccaaaatatgaatggtgcgctcggactgtctgtccgtctgaggatgaaatgctgtgctcaactctatgtgagtgcccaactctctctgaaatactctccagaaatgggaggtaaactgagtacctcggtctgatatgatagataagggcacaccgtgcaatctgacaatctctctaatatagatctgagccaacttctctgccgaagatgaaaccgccaccggaatgaagtgtgttgatttggtcagcctatctaccacaacccatactgcatcaaccatcctcggagtccgtgggagtccaactacaaaattcatcgtgatacgctcccacttccactcgggaagctgaatctgctacatcaaaccaccgggtctctggtgctcatatttaacatgctgacaattcaagcaccgagccacataagccacgatatccttcttcattccgccccaccaataatgctgccgcaagtcctggtacatcttcgcggcgcccgaatgaatggaataccgggaactatgggcttcctgcaatattaactcacgaatgccatcaacatcaggaacacatatatgaccctgcaatctcaagactccctcggcatcaactgtgacctgcttggcacgtccgtgccgaaccgcatccctaagagtacacaaatgacgatcctcatactgcctggcgcgaatgtgatcatataatgaagaacgagtgacggtatgggccaaaacactgccaccctcggaaacctccaatctgacaaatcgattggctaatgcctgaacatccaaagccaaaggtcgctctacaactgatagataagccaaactacatatgctgacttacttctagctcaaggcatcggccaccacgttggcctttcccggatgatagagaatagtaatgtcataatctttcagcaactctagccacctcctcagcctcatattcaactccttttgcctaaacaaatattgcaaactcttgtgatcagtgaatacctcacacggtaccccatacaaatagtgccttccaatcttcaaggcatgaacaataacatcaagctccaaatcatggactggatagttcttttcatgaatcttcaattggcgtgaagcataggctataaccttcccatcctgcataaacactgcaccaagcccaactctcgaagcatcacaatacatggtataagaacctgaacctgtgggcagtaccaacactggtgcggtggtcaatgttatcttaagcttctgaaagctcgcctcacactcctccgaccatctgaactgagcactgttctgcgtcaatttggtcataggggctgctatagatgaaaacccctccacgaaccggcgataatagcctgctaggcccaagaaactccgaatctctgtggctgaagtgggcctaggccaatcgctgactgctgaaactttcttcggatccacctgaataccctctgccgataccacgtggcccagaaatgccaccgaactcagccagaactcacacttggaaatttggcatacaactgactatccctcagagtctggaggatgactcgaaggtgttgctcatgctccgctcggctgcgagagtataccaaaatatcatctataaacatgatcataaaggagtccagataaggcctgaatacccgattcatcaacaccatgaaagcagcgggggcattagtcaatccgaacgacatgaccaagaactcataatgcccataacgagtgcgaaaagctgtcttaggcacatcagaagccctaatcctcagctgatgataaccagacctcaagtctattttagagaacaccgtagcaccctgaagctgatcaaataagtcatcaatcctcggcaaagggtacttgttcttgactgtaaccttattcaactgcaggtagtcaatacacatcctcattgagccatctttattcttcacgaacaatactggagcaccccaaggtgaaacactaggcctgatgaagcctttacccaacaaatcctgcaatttctcctttaattccttcaactctggcagagccatacaatacaggggaatagaaatgggctgagttccctcagttagctcaatacaaaaatcaatatccctatcgggtggcatacccgacaggtcagcagggaatacctctagaaattcacgaaccacgggcacggactctatggaaggaacatcagcactagaatcacgaacataggccagataggccaaacaatccttctcgaccatgcgccgagccttcatataagaaataaccctgccagaagaatgactaggagtccccttccactctaaacgaggcgcacctggtaaggccaaggtcactgtcttggcatgatagtccatgatagcgtgatatggagatagccaatccatccccaatataacatcaaagtcaaccatatcaagaagcaaaagatcaacctgagtctccagaccaccaatagctactacggaagcacggtagactcgatctaccactatagaatcacccaccggtgtaggcacatgtacagcagtacccaaggagtcacggggcatactcaaataaggggcaaagtatgaagacacataggagaatgtagaacctggatcaaataacaccgaagcctctcggctgcaaactgaaactgtacctgtgataactacatcagaagcctcagcatctggacgagcaggaaaagcataacaccggggctgagcccctccaacctgtatatctctaggtctacctactacaggctggcctctacctctcatggcctgccctccacctctatgcgtctgacctccacctctggcaccacgaccaccacccctagctggctgagggggtgagggtgcacctgatgcgggaaccatggcacgggaaccctgatactgagacccaccaaaacctcgggggtaaaacctggaaatatgccccgtaccactgcaagtgaagcaagacctcggctgctgagaatactgaccctggaactgaccctgtcgaccagaatgaccaccctaatagctctgaatcggcggtgcactgatggaagctgcaggtgcactgcgggatacctggagtgccgactgataaggcctaggaggatggcctctaccaaaggaatctttgcctccagatgaggcactactgaaacggccgaaatgacgaggtctcttgtcagacccctgaccaccaccctgggataataccatctcaatgcgtcgggccacattggctgcatcctggaagaagatatcagtacctgtctctctggccatctgaagcctgatgggctgagccagaccctcaataaacctccaaaccctctcccgatcagtggggagtatcataagggcatgcctggccagcgtaataaacatggtctcgtactgcgtgacggacatggagccctgctgtagacgctcaaactgcctccgaagatcctctctctgggtaactagaaagaactttcccaagaacaactcggagaacttaccccaagtcaaaggcgcagacccagctggtctggtcaagcagtaatctctccaccaagtcttggcggtacaagaaagacgaaatgtagcaaaatcaactccattggactccaaaacgcccatgtttcgaagaacttcataacagctatctaaaaaatcctggggatcctctgatggtgcaccagtaaatatggtagtaaataacttggtgaaccgatccaatctccacagagcatctgcggacatggctgctccctcagctgctggtgccataatacctaactgaactactccagccgtctgaggtgccggagtctgaagctgagtgtcaaactgctctggcgtgtgaatagcgggagtctgggtccctcccccagcctgagatccagatggtgcagtaggaagaagaccggcctgagccacgctctccatgagtcccactaagcggactagagcgtcctgaagcactggggtggcaatgaacccctatgggatctgagtcggtccaactgggactgtcggagtaggaacctcaccggcaaagtctacatgtgggtcctctacttgagttgctgctctagctctgcctcggcctcttgcacggcctcggcctaggcccctcgtaggagctgtaataggaggatcaggctgctggtcggtcaatgaggaagcacgcgttctcgccatctgcgagagagtaaaatagagactcaattatcattcagaattcaattggcacgacagagaatgaaagatgtgaagttattcctaactttgcagcctctgggggataagtacagacgtctccgtaccgatccctcagactctaccaagtttgtccgtgagttgtgagacctaagcaacctagggctctgataccaacttgtcacgacccgaaatcccacctttgggccatgactgcgtctaacattgaacctgctagacaagccaacgtttgaactaaataaaactcattaacaacaaatatgaacatgataactaaaatacaacatagcactttcgaaatgaaaaaccataaacaactcccagaactggtgtcacatactcacggactatttatgagattactacaaacaaaaggtctgaaataaatacataagactgtctttgaaatacaaagtaagacagagctgaaagtggaaagtagaaggtgacgtcaaggcccacgaacgtctgcgaatctacctcgagtctcctgtgtgactgaatgagatgctccgattgtcagtgatctctgggtccggctgcgtagtctgcacgacataaagaagtgcaggtgtagcatcagtacaaccgaccccatgtactgagtaagtgtcgagcctaacctcggcgaagtagtgacaaggctaggaccaacactacatatgtacctgtgcaattttatataataacacgaagaatggcaacagaaatagcaagtaagacagatacgaggacaacatgctggggagatagggtaacagtatgctaacacaacagtacaaggtaaaaaatgaaacgtaaaggcaagcagaagtatagcttctcaaacatataatgaacaggaaaggcacggaatgtcccctcgtgcataaactcacaatcacttggcacggcatgtcccctcgtgcatatataataacattcggcacggaatgtcccctcgtgcctaacctcacaatcactcggcacggcatgtcccctcgtgcatatataataacactcggcacggaatgtcccctcgtgcataacctcgcaatcactcggcacagaatgtcccatcgtgcatatataataacactcagtcaacacgacatgtcccctcgtgcgacgaataataaaaaaaaacacaaggcaacaataatgtgaaaatcaacaatacgaagtctcaagtgcatggaaatattcaatacaattcccttgtcccagcaaggagaattcatcaattacaatatcaacaaatgcccgacaagggtctcagctataaccaacctcgcatcagaaatacaatttcaacagcgtaagcctcaactggaacaaataactcgataactctccacgtcatgaaacaacatacagtatcacttttaattcataatttactcatagtgcggggaatattaggaacatagcaaatttcatcacaattgactcacgggcatacttgaccgcaacgcataggcactcgtcaccatgcctatacgttggacatgagttgcacatagcaaataagactcatagcaaataagactctatacctaatccctcaagctgaggttaagccaaacacttacctcggctccaaaattgcaagtcaagcctcgatcacagcctttcctttagaacccgaatccggaacggtattatgtagacataatcaacccaagtacatcaataagtactcaataaatcaatttctaagccaagttatgcatttcctactattcttccaagaatactaaaattcgaccccgggcccacacgtttagattttcgaaaattcatgaaggaatcaattacccggagtctaaggatcgaagttatgtaatttaatcaagaatttatggcctaacatggaaaatcatgaaattcctaaaaaccctaaagtttactacctaattcaatgattttaggtggtttattagtgaattaagctaggaattattgttaaaattagaagttttatggggttttacttacctcttacagtgggtggtcgtggaaggtgatgccccaagcttggatgctctctaatggagtttgaagatggaaggaatgaggaaatcccgaaattttggacattttaagtgggatgccaacaggggtttccgcacctacgaccataggaccgcaggtgcggtctcgcacctgcgagaaaaggatcgcaattgcggaaaagggcctgggaccctgggctcgcacctgcggggttgggagccgcaccagcggtcccgctcctgcggaaatctggtcgcccctgcggaaagggtcgcacctgcgatggcctggaccgcacctgcggtctcgcgcctgcggactttgggcaaggggctggggttcgcacctgcgaggctgggaccacaggggcggtcctgcacttgcggctgggaaaccgcacctgcggccagctgctgtgcaccagcagtggtctttgctggtttttgtcctcgcacagggtccgggaggcacctgggcccacccgagcccccgtccaaaaataccaacaaatcccaaatcattaaacggacttgctcgagctcacggaacacccaatacaacgctaaaactcaaaatcactctccaaaacccctgaattcaaaacttaagaactttgaaattctagaattcactttaacgcaccgaaccagcctaaaccattcggaatgacttcaaattttgtagataagttataaacgacacaacggaactattcccggcttcagaatttcattcggacctcgggaacataaaatcacttctcaagccacatttcaaattctttagaaacctcacaagttcattaacttcattttcctcacttggacccgaaaccaatcaaatcaaacccgttttacaccaaaactcacagataggacaaacaacatataataaacatgttccgggctccggaaccataacacggtcccggtaacaaggttttcacataattattcactttcacattcctttaatattttcagaaaataattttctttaaaaattcatttctcgggcttggggcctcggaattcgattccgggcatacggccaagtcccatattttcctacggaccctccgggaccgtcacatcacgggtccggatccgtttaccaaaaatgttgaccaaagtcaactttattcaattcttcaattcaaaaatcccattttatcaaattttcacatggaagtttttcggctacctgcccgggctgcacacgcctatcgaggtgagagtaacggaggcttatgaggcctcgaaacacagatttaattggaattactcaggatgaccttttgggtcatcacacatttaatgttgtaatgtcatgcatatgcgtataaatgtcataacatgcaagggtatatgcgttcataacatcaacaagcctctaagggaatcccatcatatcatttcggccactgagggcaaataatcaacgtataccagctaatcaggtggtagggcgtatataacgccgttcctttttcccatatcccatatacatatatacatatgtatatgtatataatgccacctggtcatgggataatgtacatgtataaatgaatgcaatgcatgagaagtacgtcaataaaatctctcggagtgtcataagaccattatacctttgattaataccatgaaataaactgtttcaacttgcgtattttctgagacccatgaacagatgatagaatgataagacatatgggaaatcaagaacataagcatctctagcatttctatgaacaaagtcatttatggaagttgtgcatttgctcgtttcgcttgtgtcatatggatcatgccaaaaagaaagaagggaaagccttaacatacctgagccgattctcttgacaattcctctaatacacgtcaatcgcgactacacgtaacggtggatctaagtaggaaaaaatctgtatgatattattgatatcataacacattatttcgtatccgactaatatccactccattgaaagatagcacttgcaatgatgaataaccatttaacttgttaatcacccaacgttgatggtctataatctaaagtggcaagcatgccataactccattcatattctccaagttatattatcactaaagagaccaagcaaaggtaattatccaataattctatacgtgtaaacaaggcatcttatgccttatgactcatcatgcatattgccactttggcttagcttgatgccaagtggcagccccaaaaaagatttttatccacttaatcataattatctccacaattaatcaatttttcacataattaaggattatctcaaattacttaaaatactactcacttgttaacgcactttatataccttactatcatggtcatgtggtgccttgtatgacactagtccatgaatacggggtattatagcttggaccttattttatcttaaaatgtcaaacttcgatgaaactcattttattcgattcgcttaccctctcaccttcacgaatttacgtatcacttgtttgaaatagcacaatacttataatcttgtcaaaaccttgtcgctctaccatacttttgcttgtgatctacacatatccatttacactactcgaaactttctttcaacttacttgtaccatagatttccttgtgttattctggaacatcaagcgagacatcgtatcgtctctaactattatttactttcttaactagacctcttgatacctaaaaaccattggctggatgatatgccactaacaatgccgctatcattcctggatactgtatcgcagcgcttctagtcttccatccgaaatattgacaattcacaaccttctgcatttgagtatctcgaacgttgttcacctttataattttgcatcacaacttctatctctttcataacctcacttccacaaaggtatgattcacatccacaacttgaagctctattataatacttgaacctcttgtgcatacacaatctggtggtagctccatgctgaccttttttgtttaggctggtactcttctaactggctctagcatagggctgttatggaatatggtggttatgttgtactatctctcttgtgcctctgatattaaggatgatcttgcaatgttctcaatcacaatttctataattgtctggggccaataatcagactcttgatttacttggttgatgtaactccttagtttcctcttccttttgatcaacctttatgtaggactaaactctcttccgatctgtggctcatggtattagttattactttatcctttcacgggcgctatggaatatccatgatacatccctttaacaattcaatcctttgtatatgacctgggctcaattctttttttttaacttatatcggaatcttctacagatgtataattgtcaatgtatatgcagcatgtataaaactcctaactcttaagtgcgttcataacgtaactatctctggatcattaatagaataattcttttcgttccttctcagctttctttaaatgtaagcaattatttttcctggtcttcctgcctccttgttgtgtgcatacttagcttaccttagtgtccacacatattggaattccatacaactcatatgatcttgaatatcactcttgattttacttctcgttcattagccacggtaggtgccactttcttaaggagtacatacaatgttgttatgagactgttgttacaagaccattccctctttaggtcattgaccattccctatttaggtcactgttgtcgtaaagttctgctagtatttcattgtagtacttagggagaccttctggctcttgtaaagttacaagcttgttatatcgcttacccaacaaaaatttttatgttcgtactcacctataattgtccttatttacttacctccacattcatgtgctcgcacagttgcttctgaactgatgttttgactgtcttcctagtaggactctcttttatatccataacactcatacgatatctttaactaccccaactcctatctgaatatttctcaaggttatgatgtcatatctgcgagactgaattccccatgttgaggttcattctttttatcttggatgatctattgatttgtttgtatcctcttgtctagccataactaggctcttcctcaatcaactactaactactcgttggcccattctcatatctatattccgcgtaatctctcttgtgttatttctttgtcttaacttacctcttccactagctccttatgtctcaagtgttcattcacacttatttatcaataacatccagggggaaacccttactacctctccccggtgttgtacttgcataatgttctggagtcatagcatagatgtaggacttggataagtgcaatctcattcctttatcatttttattgcgttcctcctttaccattccataattactaaaaccatttaattttgacttaataccacatcactccatattcccctttttaggggagtactaacatttagtgctacgatgatctacgtacaaatgttttacctcttcatctttggcgtcttttcacatcatcgatgacccttactcgccttgcggtaatcgttctgtaccaaggataacaaattcccttactcgcgagggggacacttagtaactgacacatacagtctcttaagattaaactttgctcgcattgcttgctttagggaagcgtctacctgaatgaccgttctctgaatttctcatgaattttcttatgttttccattctatcattgctggaacacaattttaaattctcatgatgccgaccattatcaaatcactcaatccctaattcatgtttagtttatcttgttcaccaatccatattgctttctatactggggtctaacttttccttctggtaatcacgttagagtcacgaacttatttctcgaaatgaggatatgacttttatgacctatactcttttgttgcctcaaggcctgtcacctcgcgtattttccttcccttgcctatagactctgtaatactgttttttttatctaccgttgtcatccatgtaccacgttttactcataatgcttcattaactctcttcttatttccctgctaacatttctgtctatcactttattctgaaaatttcaacaagatattcttttgcttttagctcccctttgctccttccactagctcttcagattgcctaacattctctctctactagggacgagagccgcactaagattatatttatctcttccaggcttccagtgcctatctttgtagtactcacatctagttttactattttagactgcactatctgggtgtcttacaagaagatctattagcatatttgcaatatccttcgtaaatgtcaactaacgcagacaatcaatccacaattatgggttactctaacgcaagccacatcctgattttccgtccttctcttaaaccatttttgttagctcccatagggcataacttagatcggtgtggccaattgtacatacctctgtgatacgcttaaattacaccttagaatagtgtaagcggtcgattgtcaaatataataacccaactaggttggggtcgaatccctcagagaacaatatggaggcgattaggaatgtaagagaattatcacttattgcgcagtgccaaacacttagattttgattgtgaaaatgtttataactaaatgcaaaaatataaactaacctagaaagcaagtaaaatgatcaatggcaacaagtatgaatgcttcaggaattacactcaagtaacgatccaatgtatttcacgattttacaaatatgagcgagtttatgttaattagccacgaataataattcttaattagctttttccaaagactaacaagacttcctattgaattattcctaactcaattaagagattaagaacactcgaaaatggctacaaatagttcaatcttattcctagatagaatctataaatgagggttaaagcctcaagttcttgttaattagtctttcccaaccccaaattatcttttccaaaattaattcggagttaatgggcgagtcctaggtttagctaatccctttggaaatattaaagaacaagaataattaaagtaacaataactcacttcataaatacataaaaatcattcaatacataagcacaacaaggtatttaatccacactttaaatatgaatatttccataaacaaggttcaagtgttggaaataaatactacacacttaaatattcaatacaaatcaatgaaattaagaaataaacataaatgggtaagaaaaccttaaccacaaagattgaaatcttcaaaacccaagtgtgtgtgcaaaccctagattcaatacttgttcttccttgtcttcaagacacaaaattatgttttacaatgccaaagatacagaaaataactgcaagtcgtgtataaaagaggtttggggattaaaacgtgaaattccaaaattacccaggattgcccagattttgtactgtgcgttcgcagccataggcctgcgttcgcactgaataaccttttcccaagcctatgcgatcgcgtatagggtccagcgttcgcatagttagttgaccaattcgctaaccaccataacactgtgcgatcgcatacttattcatgcgtttacatagtttgattttcttggaactgtgtgatcgcatacattcactggcgatcgcatagagtaaaaactaggaagacttcatttttcaattttagctcctttttgacttgttttcacactttttcttcacaatcatctctaaatcacttgacacctgaaatataccaataatcatcaataaatgtcttaattctcaacaaaattacacaaaagattaagtattaagagtgaaggtaactcataatgcttatatctctcttcgtgaatggtaaataatgatattcttcactaactaggtaccttgtacccttcttcatcttgcttcttttacttgttgaaatttgtatctatcttctaaatctctcattgcctttcaccataggggaggatacatattcttgccttaaggctccttatcaagaatcttacacgtcttattacatacgcgatctgctgaagacctcacatttatttatcataggaatgatgcgaactcgagttcctctaactcaactcctgcacagttatatctcttaccaaccatctttctggatgtcggtatcattgtattacgaatataagagaatttaggaatctgaattcttacaagtgggctctaccacacgatttagattaagaataaagagtgaaagtcctaaatgccctattgcctcctgcttataattgtggtgcacaacacacccataaacaagaatatactagacacggcttgtagactccctaggatataacttctctgataccacttttctcacgacccaaaccgatgggccacgacaggcacccggtgacatactcaaccgagtaccaacgtaacatatttttcctattacatcaacatgggttaatgggccagaaatgtcgtatgaggtaacaagaataaaacatgagggaacatttgatataaaacgactcaacctgatatactgacttatacatatgacatacgggcctacaaggccaaaataatcactcgtacactaaacataggccgacaagcccatacaatctttcatacatgacctatgtctacaagcctctaagagtacataaatatcataaggctgggacagggccccgacataccaatcaatacatgtctaaatcatactggctaaataagcaactccggagcaaatggagtgcaccaacattttccgctgagctgatagcctactaggaggactctcaacctatctatcgggacctgcgggcatgaaacacagcgtccccagtcaaaagggacgtcagtaaaaataatgtaccaagtatgtaaggaatgaaaatcagtaaacaatagacacgagagaaacatggagtaaaagactcaacatgtatatctgaatgtctctgtgaacttaaaaaaatgtcatgcattagcgtataaatgtcataccatgcataggtatatgcattcataacatcatcaagcctctgagggcatctcatcatatcatctctgtaacgacccaaccggtcgttttgcgtatcagggtcctgtttccttaaataaaaccttccatagcggctattcgtgctttatgactcgcgggagcgggtggtccgggatttgggaatgatttggatggtttaggaacacttggttccttaaggctggcctatttggacaagtttgactttggtcaacattttgagcaaacgaccttagaattgagttctgacagctccaatagctctgtatgatgatttcggacttggtcgtatgttcggctcgagtttctgatgacccgggagcgtttcggcgcccgaaatggaaatttagatttctttaagtttagaatttggcttggagcgggacttcatgctatcgaggtttgaatagaattctgggaccttcaatagttttgtatagtcatttgtgacttgtctgcaaaatttgggctcattccgagtagtatagacccgttcggtgcaatgtaatgaattctagaatttcaaagttcttaagtttgattaatttggttttggggttgaattttgagttatgttgttgtttctcatgtttcggaagttcgagcgagtccgtatcatgaataccgacttgccggtgcttttggacagggtcccgaggggctctggggtgttttagacccctgggagctaagttggaaaaaccaaaaaattttctgtctggtttccttctctgcgatcgcagagaagtaattatgttgggccatccaatgttctctgcgatcgcagacatcactccgcaatcgcataaggtccccttcccaactctctgcgaacgcagactcacccctgcgattgcacaagtcacctacctaccccccccccccccttccactgcatgttcctctctgcgatcgcagacctcactcctgtgatcgcataagcctacctccctaccctctacgatcgcaggccccatctatgcgatcacatagtgcttcctgggggccatggtcatttgttctcagcgatcgcaggcctgatgccgcgatcgcagtgaaggttttcctggcagtatttaaatgtccaatttcgggtttcttcttcattcctcaactcccaaccttcattagagctcctccaagatagggaaagggctgcccaggttcaaattcatcaaggtaagtgatttctagtccgttttcatgactttttaacatcaaattcaaataaaattctcttccaattatcttaaaattcataggaattgatagaaagatgtggggttttgggaaaatagtgaaactttatttttagccataaattcctaaatgaattatgtaattacgatccttgggcttcggataattcattccttcgagatttttcaaaatccgaacgcgtgggcccggggtcgaaatttcaagaaccttcaagaatgctatattttggaatttcttgttaattcttattccaggagcatgaattgattcaattattctatgtttggctagttttgagccgtcaagagtagtttcagaatttcgggcgcatcttttgatccggtccttggtccgaggagtgctcttatcgaggtgagtctcctttctaacctcataatagggaattgtccctctaggtaaccttgtttgctatttgatcttgtttgggggctacgtacgcaccgagtgacgagagtccgtacgtagtggctattactgcttcgtccgggtagttaggacacatcatgctcattgttttcctctgttgtagcatagatatgacttgtatacttgtgtgattggtattgttgtctttgaacgtgtgatacttggcttgatttaagagtgataagagagtcacggtgaagtgatgattgattatattatgggatcgggccgttcgccacggcagagtgatgattgattatattttgggatcaggtcgtacgccacgtcagagtgatgattgattatattatgggatcgggtcgtacgccacggcagagtgatgattgattatattatgggatcgggccgtacgccacggcgagattgagactaccagggtgggatccggccgtacgccacggcgagattgagactactagggtgggatcgggtcgtacgccacggcgagattgagactaccagggtgggatcgggtcgtacgccacagcgagattgagactaccagggtgggatcgggccgtacgccacgacggatatcaaacttgttgatttgagagttgctatttgatgccggatattgatgtacttgattaattgttttacttgcttacagttttctttacatcctgcttactttacgactgttggaccttagtgagtatcgagtcgacctctcatcactactttttcgatattagacgggatactcactgggtacatatttatatatatgtactcatgttgcactttctttccttttctgtacttgactgtacaggtccggaggctggtccatctgattttcaggccggcgccagacattgatagtgtggtcatacttcacggtgagctgctttcctggcgacttcctagcagcgtctgggagtttctttgttatgctctctgtctttttcacttagactgagaccctatatatgttgtagtcattgtatatttagtagtttcccgtgacactcgtgacactagttcctggcacacgcgcgttatatattttttgggttttgggatgtgtatctatgtatatgttttatttcggccttgtatctactatgattttaccttcacgcaagactagtatcacactagttgttataaactggtaaccattgacttgtttgatcgaatgggaagggtatcacttagtgaaagttatgtcggcttgcctaaccccgttgttgggcaccatcgcgacctgaattaggatttgggtcgtgacaatctcggccactctgggcaaatcatcaacgtataccagttgatcaggttgtggtgcatatataatgccgtatccttttcccatatcacgcgtatatatatatacatatatacgcgtatataacaccatctggtcatggggaaatatacatgtataaatgaatgcaatgcatgagaagtacgtcaataaaatctctcggagtgtcataagaccattatgcctttgattaatatcatgaaataaactttatcaacttacgtattttctgagacccatgcacatatgatagaataatacatatgggaaatcaataacataagcatctctagcatttctatgaataacgccatttatgaaagttgtgcatttgcttgtttcgtttgtgtcgtatggatcatgccaaaaggaaagaagggataaccttaacttacctgagccgattctcttgaagaaactcacgtttaagcctttagaaactcatagtaagttggcattgtttaccctgaaaatgatattaacaattatatatgattttgtggttctaaaaatatgtgatttatttcaatactagttgttaggcaacagatgctaagtgtaagtaaagagaataagatatgcaaaccaagttgttactaggctggccttgagctcactggatttgggcctcgaggttgaattgtgatgcttagcaatgggcaatagatgaagacagtaaagatattagggcttcgaggagggccttcgttgcccttgaattccgttccctagttcaatccggaactccagatgtgtaagtagcggccaagcggctctgtccttttcaaagaggttatccttctctctccccgcttcttagtcttataggataactcaccattcaagtaagtcactttacccggcgcttactgtcttctttctagcctaattggtagcagtccctttttagtaccacctttccttttcttctctttcagcagcctcgtaggccagctgaagaccgaataaagcagttcaagcccgcttgagatctatccaagacctggccgatggctacttccaattcaagtgccacttatcttaacacaattcgggctaatcgactcccagcctagctagacctggtgaaagcaatcaagccaaagcaattcttattcctagccctttatgatgaataatgagaaatgaattaagaacaattaatgaacacaataaatggaaggcaataaatcagtggaacaatgtttgagaaagtttaggctagaaagtaaataatgttctattgtattgaatattcatgtgtgttacaaaatgacaagggtccccttataggagggggaatcccaacatagtacaagtctaattatgacaaggttacggatttgtactattcttgcggtccttcgaagttttctcgcctttccatgacgaccatcgatttgcactgctccgaggttgatcgtagtgagccttcgacgtgatgtctcgaggggtacacttagggtcgaacctaacttcgcctcaaacttctcgaggccgggatcggagtgccgtaaagaccataaaatcggactccttggttttagccgtataagatagtccccgcgtttcttagatgaaatgcaaagaaatgatttcgacttctcggctcatcgatatctccattgtgacgtcaaccacgtgagatcaacaactgatgtgacagaaagttgtacagaagcacggttcccgaaaatcccacgaaccgtcattggtcgccctttcaactccttcaacatgatcagatggctcctatatatacttcaattcttaaattttcttacttttatagcattcaaatcttcttgtcttcatcaacaacattctgttttctttctgtgtttatctctgcatcagttctctcttcttactttgaattttaccataatcatggcaaaaacttctgaaacggtccttcaaaaggataaggctccttcctcgccatactcatccaagagtaaaacaaaagcacctccattgaagagtgtattcctgggcccttcgagacatcctatgatctcaaaattgatcaacctccttcgacatcgggttgatgcgagcctatgtctcggtacatcagtttagtgaccgatgtaaagaaggtaaaattagattgtcgctgggggaaggcggtgcaagtggagatcccctcatccgaagaaagtataattacacacaaagctggtttcctcagcgtacacacgtacctcttcacctttggtccggtagattcttcatctccactaatagacccggtgatcctcgatttttgccaacaatatcgagtgacgcttggtcaaatttatacttttttatggagaattgtctatctgatcatatacttctctagcatggtcaaagggatgccttttaccctcgatcatctgattagattgtatggccctcgtctctattgagggggtctagtcaaactgcagcgtcgatataccaaagcagtttttgccagcatcggcgaagataaagaccgagggtggatgaggcgcttcgttcgagttaagacttcggacctcatccctgccgagaggatgtcattccctgaggaatggaatatgagacgtaagtatcgagcatactttatcatatgaatgtcttcttttccctttttgaactaattcctttcttttctgaattgattctcttctggttgcgtagccaccgtgtggttccctggtgcggtcaaggacctcccgggctgggttaaaatcttagactccatctccccatacaacaagcgcgtttggcacaatttggccaagactcgatgagaggcaaaaaatcacggtacgccctcaccactgtcactcctaagttcctcataaatagatttcttgtcggtatgtttgacattttatgcttgtacaagcctcgaggaagccgtttcaatgagactgcctcctcctagcaaagaggagacccaaaaatccaccaaggacaaaaagaggaagaaggaggcaccgacggagtctccgaaaccaaagagagctaaggctcgaaagcctagggccgatgcaacggtcctaccttcgacagctgctgtgagtcttcgtgctgaagacgaagatgatgatagtttcccactggtacatagggcgaggtgaagcgctaattcttcgaaggttgccggcagaagaccgtcgagtcagaggtggccgatgcggtcccaccttatattgaggatacccttgaagagggtttggacgtagttcccaagccgaccattgaacatggtaaaactcgtgcctatgagcacttgattagctcatttggaggatctagctctgaaacccttcgaaggagagaggaagctcctataggggtcgatgtcataggtgatcttcaatcaggcccgttgttctcccccgggcagatacgagacgcctagaacagggaaactcccgatgtgggggcatcccagggagatgatgatttatttaaagactactttgtcggtgtcgaagaggacgccgatcttgatgcctcggttgctcttgaggaggctgtgaaactccaaaaatgggtaatttcttgacataatattatgctttatgttttaattcccgttttataacttatttcctttgtgttgtaggtcacaacgatgtacgaccaggctttctccaagttacaaaaggagctgactcatcgtgatgaggagtttgagaagctcacgtcggagttgaatgagctgaagacttcatatgcccgaaggatagaggaattgatcaacctttgggcaagctcggagaagacgctccaagagcggggcaacttcatcgagtatgtagtttagtattcatgagcttgccttttgttttcataacttggtgtttattatcttgactcggtatttgcagattgagtgaaaggatgccccagccgggcagctttgggaagagattgcggccaaagatgccgagttccttgagctgaggcggcataaagatggcacggtcgtggagagggatactattaggggggagctggcctcgactcagagtcttcttcgaggtactaaagaggaggctcacaaatttaaggcgcttcacgctgagtcggctatcacattatccacggccaagtctgaggtcgattccctcataatctcctataggcaagatgctgctgcggcgaatactcgagctagggagatatctgatgaggtcgagctcaaactggctcgcgcctttgctcacgctcgattagaggtttggaggcaggcctttgagaaagatcaccccaagggtttcgatctctctgccgagatcgaagaagcgaaggctctggaagaggagtcggcagctccgactactttggacgacggcttggaaagtggctcgaggagtagaaaagatgaagactaggccctttttactctttttactacttcttctcttgtatgtgggctccatgtgggagtttttgtaaatgcacctttgtaaatgtatttttggaatgcaaaggattctcttgtttaatgtcttcaaagttttgccctttagtttcatgcaaaaattgagcttgaactttgatttaaccccttcgagctcggtctcggagtaacagagacccttgatatcgaggtaatctgattctaatcgcatgccttcccttggtcgggtcggcaaggaattgatttgaatcctcgacccctcaaatgctgtttgataacgtcattcttatgacatgaccgtgaagtgaataaagtggccccatcggtacatttccccaaaaagtcataattgctttgttagagctggttggctatcgaagttatgaatagtcgtcgctcttcttatatatacttggtttctatttcattaggagctttactgctttgcgcaactatctttctatagaattctttttcttgcactagttcttcctccatctcagcttgaagcttccgccatagttttcaccttcctcccctgctttgaaggagttatgtctacatccgctcatgagaaagtgggaagtccctcctctgcttcccgccgaactattttgtctcgatgaagactttacgatagagaaacctctcaacattctgggccatcgagatcatgcatcgaggttcattcgatcaatagaagagagacacctcgaggctgtgaagagagactgtggatggggagaaaaggtgatgctgcagataccctcccgggaagagaatattatgacccatgtagaggggtttctgaacgtgtatacgtacccttttacgttgggtcctctcgcacggctcgtactcgagttctgtcaaagatatcgagttactttggctcagatccatccgtctttctggcgaatcgtgttgatgatgaggttttttgccgaaaaggctgagctcgagttcacccttagccatcttattagattgtatcggcctttgcattatcgagttctaatcacgctacgacgccgatccacaaagacctttattgccagtgatgatgaggacatgggtcgagggtggatgagtcagtttgtccgagtgaggactgttgatattattcctgcgaagttcatgccctttcccgagaaatggaatttcaagcgtgagtgatacgccgcactttatcatttttgttcttcgtggaggcagactccgtaagaacgttttctttctttcttcgtagtgatcttgtggatgccaaatgaggtccccgatcttacggactgggcccacaaactggcggcctcttcgacttatgatgagcgcaaatggcgagatttgttgaagggaaaataggaagttaagcaccatggtatgtgctatgtagtccttctctcgaggaattctttcctttaagtacactaatttctttgctgcaggtatcggtgagttttctaaggtgagaccatgccctttcaaggaggaggaaaggccaccgacttctaatccaggaaatgataataagagaaaaagatcctcggaggatgaggatactcatagcgaagtaggacccccccgggggcgtggggaggatgcatctagtaatgaagatctcataatcattggtagttttgtggatattaatgcacctggattctgcattggtggcttgaacaagggggttggcttgaacctaggggccttccgaggctcttgtagccttgagggggagacttcacaagagaggaggggcgaaggccctttattgcccgatttggcagctggttctcagatgtcgagaagtacttcgagagaaatggacttcgatgtgtctctatccaatgagaatgcctcaggtttctctaccagggccgatgaggccgagccgataaatgtgaagtcgacctttgaggaagctcagggacagactatatggtgagttttgaagttgttttaacttttctaacttcgtactttcttctttttaactgaaccttctttctcatatgccttcgataaacttaagtctgagttgcttcgctgtgaggctaagttgtgaaaggccttgaatggggagaagtctctcaggcttctttgtgataagaaggcaagagaggtgatacacattcgatcagagtttaaccgaaagcatgactatgaaagcaatttcgaaaaataggtaacccctattttgagggaatacaggcttctactcccgtcttcggaaactgatgttttgatatctcagttgtagagaaagacagagacgctggaacatcttcggggcgaaattagccaggtcaattctgaacgcaatgaattgaagacacagaaatgcccatgttgggtccaaaagaaacactttatctaaggcctccgccctcgagatacaacttcgtaacactcgaaaaagcaactcggtccagacgagcaagattgctaagcttaaaatagatcgtttgaagatgaaggccgaggttgtggacgctcgagcctaagccgaggaggtccgagcaaaggccgataagaaggtggccatctatctgaaggatgcttccgaagatcatgcgaagttgaggggggcttctgatagagagagaagaagcaatgagtattcccaatgcagatcccggagggaagccctcgaagagattcatgctaagggcttcgatctctcggaggagataaagcaggccaaagtggatgagatcgacgccaagttcttcatttctattaatgtcgaagataataaggaagaggctggtgagggagctggtccgagctgatgaaggcacagtcccgaggggagagaaactaagtccccgagagtagattaggtttttcttttttgatctttgtatagggctctcttgcgagagtatttgtaaatgtatctttgtattatatataaaaaaaaactttggttttttccaacttgcttgtgtttttgttttgaacttcgatgcttgccgataattagtccgatgagttggactttttacaataaaaaacccttagattattgtgcttgacgggcgattggtaatggtcgacagttgaccgtttagggctcagtcctcgagtcaagttttgactcgagctcatcgacccttaggtttttagattgaccatgaggatctttaggctggcccttaggctcttacgcgttggccctgggctcttttagatcgtccctgaggctctttaggctggcctttaggctcttaggcattggcccttaggctctttttagattgggtcgatgcgacctctagtatggtaataacttggatttttgcctcattttccgttcctctatacctgagttttggatataattgtacacaaaatagcctcgaaagcttacatgttgtgcttgttgcaggattgaaccaaaaatgaggacactcagtctaaaacatgctcaaacacaggagtgaatccagcataaggatcgaagacaacaaaaagttatcaggcaaaaggccaccgcggccgcggtccagttttcgcggaccgcggtggctgacttcagagatgctgcaggcaaggcaggattccaccgcggccgcgatcatggtttcgttgtccacaaagatcaacttcagagaaccagttccgaggcaaaactcaccgcgaccgtggtcccaatttcgcggtccgcggtggttcaatttcagcagtcaagacccagatgattctcgcggaccgcagtcatgtttttgcggtccgcgatggcccagcaggggcatttttgttcgaaattctggcagactataaatagactattttgtaatttttttacatatctgggaattttcagagctgaaactcgttcttgtgcctagggtttttgcatttttagctttgttcttgctattgtaacattggaatttcaattttcattgttaattatagattaatgggttcttcttcttctctatcattggtttctactttgattatgagtagctagacccattagctagggttgtgtctcaaccctagtgtgggtacgtaatgggtttgttaaattaaggttgggaaattagtgggtgttagttgtaattagccctttcatgacttgggtccttcttgagtctagaaaattagcctaataggaaattagggaattatcaatagattggtagtcccaatcaattgggttgaacccagaaatggtaaaaccctacttgagccctaattaacgggttaaacctcgagagagcaatacccttcctaagccttacttgctttcttaattgatacttcattggtctcgagagagtcaatttgggtaatgccactcaaattgccgagaggtatagaatgggcacctgagtgcattggctatagattccctagtgaattccccgaccttagacttgaaacccgtcgcgcatccacctaggcaaaggtcacaaccctagtgcctttatcaatataagaaaacaccaacaaaaacatcgcaattattagttagtacaaaatccttagaactaatattagtatagttcaacccaatatgtttagaagtgtaattagtaacactctcccctattagctcacttatacactcactcccatataaagactctctgtggattcgatcccgaccttctcgggtaaaagctacacgacccgtgcctgcctacttatatagtagtgttggtgggacgtgaacataaggctatagttattccctcattttttctaaggacttttgaagtttttgtgttcgtccgactcttcgaaggatcgataagaacctcgattacgagtcgatatgtgacgatagttgagtacctcgggaggtttactcgaaggctgatttttcgaagcctttttattgaaggtttattgtttcgaagccttttcattgaagactgattatttcgaagccttttcattattcgcagctgatattattgaagctcctttgcttatgccgagggtagcctgattaaccggttcttttcgaagtatttgaaggcatgtagttttatggcggtagtcggacgtctccgagccgtgttaatttggccggagccttttaatatgaccgtagtctttatgttttgccctaaccttttagtccccgagtgatatagcctcggtgtctataccgagggtatgcttttttaggggtcttacaagttcgaatatatagccttggccttaatatcggggttatgcctttttaaggtcatatgaatttgggcatgcctcgttgaggtcttacagattcgattttgcctcgttgagggcttacgagctcaaagtttcctcattgagggcttacgaattcaagtttagatggctcggtgagttgactgtttacgacagtccccgagtgttcaggagtttttggccctgcagccgtttctttgtgaaaatagcaaacttctttggggcataaagtgttttgatgataaaagatactccttcgattactttacaagcgtacatgttttcgccatcgagagttcgattattctacgcggacacggttcgttccaccgtttggcctgatacaacattctcccgttgagaccctctttggcatattataatttctttgctgaggtgacctcccggggggatgccccccattatttgaggttgattgaaaggaagccttgaatacttgatgagttctccttaggtagcatatagatgttgcctcattaaaaaacctcgccggtaaaacccattttgggataaaaccctatctaagggaaaagagcgcaatgcatgactccaggaaagcaaactatatcatggatacgaaagttttcctacaaaagggctggctattaccaagctgcactaacagttaatttgcttatagtctcaaaagtttttctaccaaaggggctggcttcaacaacccataagggacgggttgccaagctacacaactcagaaaacttttgtactacaatcaacgcaactgttataactcagaaaactttcgtactacaacaagctagccttcttagagtattcttactctattttcatacatggaccggcctttccatccattcgaaagaaagaacaagagggaaatttagaaagaactcatatgtaatatattacaaaggatacaagatagcttacaagatgattgcaagatgatcttacaactactacaaggcctcctttatataggactaggaggttattacaagacaaacttacattaaaataaacttatcttacatggcaaacttatctacaagtgggtccctttttacatatgaaagaccttatgcaaaacaactaaaaagctcctggaaacatgttacaggggtgaaatatacgtggtttagcatgtgaaaatagtgtgttgcatgtgacgaagcatgtggaggcatgtgaaaacatgtgaaagtgggacccagctggtttggaaggatgtgaaattttgtcttggcatgggtagatgagtttttagggttttttttgtaggtaatggaggattatggtgggattaacagggatttagataattgtcttcttggtttgtcttctaggcaccttttcagagatcttgtgtagtaacgcctagaacttgacggttcattttcggcatgttcctggatctttggattgttgggtgtgatcctcaacattaatctggagatgtcctgagtgtttttttcccggatgatttcatacggagtttgatattcttttgctgcttctcggactttttcccggtgagtatgagtgttggtataattccaacttacccaatcttttggccatatttctttcgggatatacctgttttgctggaaaataattctttgtacttggtattcttcttccatggataagatagacacgggaaatttccaccagaatgacgcctctgcttgtgcctggacttttccattaattatcttcactggcctatgaaacatgaatacctttgcattgtaggaatcgttgaaacattttatccaatatcttctaggcttgaaccataataaaaacactctaagagctggttcaatgttgtcaaaatctttgaagacattgcacttgaattccatgaagatgtagtaatgatgacatatgtaccagaaaaaccataataattcttgtggaaacttcttgacttgagctatgaatatatggcagaatggatattctagattgaccccatacggcttgagaatggatcctccatgttgccggaaaacctggagcttataataagtccgtctttccataataattgacggatcaaagggatccatgaggttgaacaactccggtggatgatctgttggcttcaatgaacttgttcttggtatatctgagaatatgaagatgtgactggttggctctttctttgacttcatctttgctagggaaaatctttttgaaaatccttccggtcgagagagaaaatctgcaagaatattatcctttcctttcaggtgcctgacttgaaacttgtatggagagaaccattgagaccacctgagaatttcaggattgggaataacttttgcatttatctggatcatctttggggaagccttcatatccatctctatcagaaattctgtgtgaatcaggaaaatttgaatttcttgattccattttttactgcaaggatttctttgaaggtggagtggtaatgttgctcggcctctttgaactttccgctggcatatccgcatatttttctctggccattttttttccaaatagaacggcactccaatattcattgctgacatcagtttgcagtatcttcttaccgtcggaagggatgtagagggacttgacattttgagaagtctcttttatttctctgactacttcatcttgcttctttccccatgatggagaatttttcttgagcatgtttgtgagtggagaaatatatgtatagatatttgggatgaaatatctcacataatttactatgcccaagaaccgttggatctgctttgttgtgaggttggtatctggaaacttgagtagttcttgacatatatgtggtcctgaactgtatgcaccttggataaaatgcattccaagaaaatcaatctccttttgggcaagaaccatcttttttgctgaaagcatgatcccgtattgtgctatcaatgcctcaaactgacgaagcaaattgacatgttcctccaatgtatagctaaataacatgatgtcatcaatgtaaaccaaagaggtatggaggatgggctggaatatttttatcatggctttttggaacaaggagggtgcagttttcaatccgaatggcatgaccttccattgaagtgatgatcggggatgcaaaaaccagttttgggtctttcttcatggtggattcccaattgccaaaatccagattttaaatcaaacttggaaaaatatttggccttggctaggtgggagaaaagagtgagtttatttgggatagaaaatttatcatcttggaggaaatggttaagtgactggtagttaatgactaacctgagttttcctcttgtctgctcagctcttttgttgacgtagaatgcttcgcatgcccattgtgaatctgatggctctattagatcaaattccaaaagttcttcacattctttctttgcaagctggagatgatttggattcatgcctgaatgaattgattttgttggattgatgttttcattcttcttgtaagggagcttaataaaaaattcttcttttttccataacaggattttccctttcttcatgaagtctttgtgggattcagcacatgaatgctcaatgaaattttgctcaatctctttgattttctcatcattggtgatttggttggaatctcataataaggtttgaatttcttcttgaaagctatcccgttagccttgatctggagttgatctctgagttgtctgtaaatgtcgaacccaacaataagatcttttcctggtacatcagaccctatcagcttggttctgtacttcagtcctggaaagaactcaattgtaactggatgctttgtgatgacagtgttgaaatccttaaagtgcggcatccactaatcttccgggagaacaacaggatttatgagtgaggaagcaactccagtgtcgatgaaagcaataactcgaattgttctatcccatttggatgaatagactttgagttctacttgaggaacgactgtgagagcgttgatctcctctcgggcttcgatctctggttctgaaatttgttagtgatcattgccttgatcttcatagatatccagagagaatagagtttcttcactaggttcatcatccaaagagaatatgaattcaaggtcatcctcttttccgagatgtatgccagtataatcttcaatttcttgaaggagtttgacagatcttcttgattggggacagttttttgcaaaatgtccaatcttgtggcaaataaagcatatgtttttcttgtgaaaatttcctggccttctacgtctgaattattttgtgcgtttctttgaccttgattttccatctgaaattcttggccatctgaaactcctgaatcctttctatcgtctagatgttttgcaggaacatcctgatccagtgatcaaatcagacctgcgacatgctttgtcaagcgctgggttgtgctggataatttgttttaggtctgagcgcttcatacaaatatcctccaaagctacgaatatagcttgcctgatgtagccgacttgtgggactgttattgattgaaacttttcttcaatgatggtcatggttcggctcgccaacagctttggaagggaagagacaaatgcttgtttcaggttgatgtctctgccaatttcaaagtataactttgccattttttgaaaatgcctgtcaatgtcatttctgtcgaatgacacacacttcatctcaaagagttgtcttcgcattttctcctttctttggccagtatctccgcagaaaacttcatgtagaatcttgatgttgaaggcgaaatcccgggatgtaagaaaagtatttttgtcttgaatcccaagtgaattccaccaatctctgaggattcctgagaaccgtgaagttagttctgacaggatgatatacttttccagttccaccaaatttttggtcaccatccaagtatagaagtcttggatcctttgaggccatttgaaactttgctgtcgtctaaggtgaaagtgtggaatccagttccaactggttttgacgccatgggttcctgtcttctttctgggattggttcacccggcatgacttcttgatcctcctctacttcagatatttctaggtctcttggttggctcacaaatatcgggggatcatcttattcggaagagttttctgtggaatcaatgcttgattgagagctatcttccattatatcatcgtcagaggaatttagagattctgaccatgtagtatctccttctgacatgtttcttggctaggaaacatagaagttccgaatcttctgatcagaaatcatcagactttcaaggttggacccttttgaactttctccttggtatcgccttttcttggtttgtttttttgctgcaagagcatctttcctttcccaaaccatttttgcaatatcgaattcaggctcttcttttaagggttgggtgaaagagataggattgtatgaggtagtaggaaaagtagaaaaggtgttgtccatttttggtggggaatatgcttgggttgacatggggtagaaggtaggttttgaagggaaaagtggggggttttgtgactcaaagcggtcatttctcaaaagttggatttgttccttgagtgaaatcatctctttttgttgttgttggaagaactggaaaagtgaagttcctggcggacaaatctcatattgtaaattttccaatcttagctccaaggctttgattagtcctgcatgctgagatgatgtctgctccacctttttctcaattgtttccactttgctcattaacttgtttagtgcaagggcaacattttttatggagttgtcaatattgttgagcactttattttggcagatgaaattttctgattgccagttcattgttgcctcgatgtcacttgttgggagcttttctccagaaggtaatactatgtttttcttgcggatttttggagcatgactgataccttctttttcaaaaggttgaagtggaggaaaatcttgggtatggctggaacttgaagggctcatcatgaatatttgtgggtgtgtggacttttgggttgatgcagttttaggttcatgtggctttttggattttggggtgatctcactatctcctcaacttggagtgaatttttctggtaattttggccattcttggggtttataactgaccagaaattcatatttacctggacggcttaatgaaccaattgaagggtctttgttttcatatttggctcgaaactgcttttcactagttttcccctttttcttggatttttgtttgggctcgttgaggccaaatgtttcccagtgacgctggtggtgttcatcatactctccaattggatcttccaaacaatcttggcagtcaaaaccgagatcccaatggcagtgtcccgtaaaggggcatttgaaccaccaaactcttctgccttctttgtcgaaatgttgacaccagtcatgttcttccatgatgctttgtatattccaaaagagttctctgtctgggtcaggccatgtatctcgtgtatctttgggttggatcatttggcaagaaaagatggttttattgggttttttgagatgggaatggtcaaagcttattgaaacatttttgtcatttcttttggtaaaagttagctcaccagattgtataggttcttccggttcccttaacctttcataatttgtgatcaaggaatcaggaagaattttgacaagctcatctctggaaatttgtctgggtatttgggtgcacatggtatttcctttggtagcatcaatattcaagagtaaagtagtttctcctccgggaaggcaaagatccatggcatgattttggactcgccacgctatttggtgatgaagagtggcttggatagaatctttggcttgtggggcaccatgaatttggacctggagttttagggcttcggttaagtatgggtcataatgggacatattgaaattcggaaagatggttatgaaaacagtccctgcattcaagtaacttctgcagtacccaaatttgcatgttggtactccaaatatcttgtgtctaggagagaatgtcgagcaacaactggttgaccttttcttccatgataagtcagagcaattcagatagcaccaaaatgaatatgggtaaaaccatggtctctctccactgtctgggaaaatcatctggaatttggagggtaataaattgttcctttcgaatggcaaaaataggatgctggtcaagttttgaggcagcaacatattccttgactccttttagtttatgttggactaaggaacggatttgggtccatggtgcaaatgattttttggcaaaagtagagtaagggtttataaggggtagtttagttgaagatactttctcttcatcgggtaggcggcacggtcctttatttactcatttgggtgtggttgagaatgtagattgtggtttctacttggttgtttgcttgtcctttggctccttcaatgttgaaggcgtcgatgccggtgccatgtcgtgcaccgctttttctgcatgttgctcctcgtacactgtttttactccgtccttcattggaaacttcatcatttgatgaagggttgacggcaccgctctcatacggtgtatctatgcccttccaagtaaggcattgtatctcatgtcacattcgatgacatgaaacttggtatcttggattgtaccggccatgttgaccgggagggtgatctcccctttcattgtctagctcgccgtgttgaatccattgaggactcaagaggcgggcacgatctggtctagcagtccgagctgctctaccaccctcgacctgattatgttggttgagctacctggatccacaagcactaacttgaaatttattcaaaagaaaagaaattatcagcgcgtcattatgaggccgagacaaggtttcgatgtcctcttcgctgaatgaaagagcatcttccggtatgtagctccgagttcgcttttccctggtgatggatacttttgttcgcttgaaaacgggtccatgtgggacgtcgactcctccaatgatcatgtggatgacatgttgtggttcttttggcttgttcttcttgtttacctctcttccccgaaattggttcttagctcggtcgctaaggaactctcggaggttcccttcgcggattaattgggttatttcttcccaaagtggtctacaatcttcggtcctatgaccgtgagtgccatggtatttgctttaccaagttggggttcctttgtgaaggatctgataatatgggtttcagccatctggtatctttgaaacctatgaccgacacgatgtctgaaacatcgatgttgaagttgtactcagataaccagggggcctctgtcagtcttgtatgcctatcgaacccggatttgtttatcaatccccagaaaccttgatctcgatctgtccttccattgcagtgaggtatattgcacctcggggcgtttcttcgatcttctatgtagggttggtatctttccttgtttcttgactccctttctgtagaccttggttcctttgctaagaacgtgctaggatacacagagcccgagggggctcctaattggtcatcatcgaccttgatcttcaactgatatctgttgtgcacatccgcccaagttacggcgagatattcaatcaagttctgctccagctgtttcgaagctatcgagcttcgttcattcaagccttgagtgaaggcctgcactgcccagtcatcggagactggtggaaattccattcactccatgtgaaagcgagagacgaattcccttagcatcttgttttctctctatttgattttgaagagattggacttccttgtagcgaccttgatggcaccggcatgtgcctttacaaaagagtctgccaacatggaaaacgaatccattgagttcatggccccctttgatagagtgtctcaaaaaaaaaatcaacaagacggattcaatctcgtcgtcctttaggtcatttctctttacagcacaagtgtaaggagtgatgtgctcattggggtccatggtcccattatacttttgaatatcgggaattctgaatttctttgggatgggcttcagagacgcacttgatgggaatggcttctgcacgaacttctttgaatctacaccctttagaattgggggtgcgctcgggatttgatcgaccctcgagttataggtagacctttttgtcgttagcttctatcttcttttcccctgattcaattcttttagtaaggtcctcgagcatcttcataatagcaaggtttgctgctaacctgttattactcgatatctctggtggatgctcgactcgaggagccatttccgttgttgttgtgcttggagttttttgttggctttgcagctaagcaatagccacttgttgtgcctgtaacatctcaaaaatgacttgaaggctaatttccctttcttcccgagcaggagttctctgcgccttatgttggtctccaccgtgcacacttccgtcggtatgagagcttacatcgacatgttgagcgttgcgtgagcctacatcgacaggaatttgtcctggtgcccctccagggttttgtggtggtacaccggcgcccgaagcagctgcattgttctctccatgatgttcaaggccgttgttttcgtgtgcattcaatgagttagacaatttttgacctgaaatcaaagattcttggacaagaaaagtgtgaagaacaacttgtgttttcagtaaaccagcactaaaacaatcactattatttttagccccacggcgggcaccaaactgtttaccttgaaaatggtattaacaattatacttgattttgtggttctaaaaatatgtgatttatttcaatactagttgttaggcaatagattctaagtgtaagtaaagagaataagatatgcaaaccaagttgttactaggctgggccttgagctcactggaactgggcctcgaggtcgaattatgatgcttagcaatgggcaatcgatgaagacagtaaagatattggggcctcgaggatagcccgtttatgatgaataatgagcaataaacaaagaacaattaatgaacacaataaatggaaggcaataaatcagtggaacaatgtttgagcacgtttaggctagaaagcagagaatgttctattgtattgaatactcatgtgtgttacaaaataacaagggtcccctttatataggagggggaataccaacatagtacaagtttaattatgacatggtaattctattggtacagttgtttaatggctcagtacgaatttgtactattcttgcagacctggtcagctctgaccacgtgtccttggaagttttcccgcctttccatgatgaacatcgattttcactgctccgaggttgatcgtagtgagccttcgacgtgctctctcgaggggtacacttagggtcgaatctaacttcgcctcgaacttctcgaggtcgggatcggagtgtcgtaaagaccttaaaatcagacttcctgattttagccgtatacaggcatgtaacatcttgctaattgttaaaaatcctttagtgggtgtgtcccacttagtggatgactaagccactttaattgtcacgaaccaaatcggtgggccgcgacggatgcctaagtcctacctatcgaacatccttaagcatgcgtctaagatataaacatgaataacatacgtgagggaatcctgtccaaaagacatatatacatatacatgcgtaatacaatggggcgagccggcaaggctgatatagacaactatatacccaagtttggaagccggcaaggccacatactatccaactatacataactgtctacagacctctaatagaatatacaactgtacaaggacgggactgggccacatcatacccatatatgtatacaagcatatcgtaccaaaaccaaaagcagcttcggatcaagtagagcaagccaactctcgctgatcaaggatcctaagaagggggaccgtcagcttgcctacctgcacctgcaggcatgaaacgcaggccccgggaaatagggcgtcaatatgaataatgtactgagtatgaaaggcataaaaatcagtacacaaaagacatagatgaaacatggaataaacaattccgcatgtaagtctaaatgacttgtaaatcctaaaacatttatagtgtcatgcatgtgggttcaaatgttgtgtcatgtatgggtataggtgtacataacatcgtgaagcctctgagggcatcccatcatatcatctcggccactttgggcaaaatcatcaacatataccagttgatcaggtggtggtgcatatataatgccgtaaccctttcccatatcccatatacatatattatacatatatacgcatatataacgccatatggtcattggtcaatgtaaatgaatgcaatgcctgataagtatgtcaataagatctttcagagtgtcgaccattatcaacttacgtattttctgagacccatgaacaaccgatagaataataagacttatgggaaaacaagaatatacacatctctagcatttatacgaatagagtaatttatgaatttgtgcatttgctcgtttaatttgtgtcatatagatcatgccaaaaagaaagaagggcgttaacatacctgcgtcgattctcttgagaaagattacaccgatttccttaatattttaaaatctcacattaattaaggtgctctgaaatctcgggttttgaagtgttgaagacgctatggaatatcatattttgaattcctgaagatacttaaaatctcacgttttaagaatagagatgtgattctcatgtctttaagacatataatggttctctttttctagaatgatatatgactcacgttataagacttgctcaattctcacatctctaatcatgccacctatattaatgacttaagattcatacatggggatggaggggtgctgccacgtgggggagggttagtcttatccaaccattccttaattaaatagttaacctccaattaaccaataattaaccaattgcccacataattaagtattatctcaaattacttaatatattactcacttttaatacactttacgtaccctactatcgtggtcatggggtaccttgtatagcactagtccataattacccaaatcatattttatccctaatcgaaaaccttcaacgaaacgcattttctttaattcgtttgccctttatccttcatggtacttacttatcgcttgttatacatatcataaatacgttaacctcaagataatctcatccctgagtctacgtcgattaacagaaggcgaaattttaacgtacgaaaacgcgagatgtaacatcaatcctccaaaatatgacatatatgcaagacttttaaaagtcattttaattttaaggggtgctgccacttttttgggggaagggggggagtttaatattatcccataatttcttagttaattaggtaatatctcgttacccaataattgacaaattacccacataattaagaattatctcaatttacttaaaatatcactcacttttaacataccttatacaccataccatcatggtcatgtagtaccttgtatggcactaatccataaatatcgggtactatagctcggaccgtttttatcccaaatcgacaatcttcaacgaaatgcattttctttgattcgtttaccctttaaccttcacgacactttacttatcacctattataaatagcataaatgctcataacctcaaaaataatctcatcccagaatctgcgtcgattaacttacgacgaaacttttacatacgaaatgcgggatataaaatccttccccccatagaaacattcttcctcgaatgcttaattcccccggatctatattaaaccttggaagagtcacctttgtaatagtactactatcaatccttcatgtaaataactcaataattcaatgccacatattgccacaattatcactcacgacaatggcctcacacgaccaatgataataactaatacaagaatccatacacgtaccttaaggttgtgatgtctcagtcggacccttttctagaagaggaaataagtgaggatatcttgacttcatgtcttcttcggcttcccaagtcatttcttccacattcttgtttctccaaagtattttcaccgaagctacgtctttagtccttaatcttcgaacttgtctatctagtatatcaatgggagtttcttcatatgttaaatgttctgtgacctgaacatcgtgaactaacacaactctggaaggatctacgctatatttacggagcatagacacatgaaagaccggatgtacaaattccaagtcaaaaggcaagtctacctcatacgctacctgacctaccttgcgtatgatcttatatggtccaatgtaccgagggctaagttttcctttcttttcgaacattataacgcctttcatcggtgatacctttaggaatacccaatcgtcaacctgaaattccaagtctcgccgttgattattcgcataagacttctgaccactttgagctgctaatagcctttcctgtataagcttaattttctcgattgtctattgtaccaactttggtcctactgacgtagtttccccaatatcgaaccaccctatatgcgacctacacttccgtctgtaaagagattcgtatggagccatctaaatactagaattataattattattatctgcgaactcaagaagattcagatgatcatcccagctacccttgaagtctatcacacaagcacataacatatcttcaagtgtttgaatagtacgctcagcccgtccatctgtctggggatgaaatgttgtactaagacttacctgagcccccaatcctttttggaaggacttccagaaattggatgtaaactgagctcctctatccgggataatagatatagggacaccatgtagtcgtactatctccttcatgtaaagccttgcataatcctctgcggaatttgtagtcctaacgggcagaaaatgggctaattttgtaaggcgatcaataattacccatatagaatcgaactaacgctgggtacgaggtaagcctacgatgaaatccatatttattgcgtcccatttccaagttggaatctccatagcctgcaataatccaccgggtttttgatgctcaatcttgacctgctgacagttagggcactgagcaacaaactctgttatatcctttttcattccgtcccaccaatatatttccctgatatcatgacacatcgttgttgctcccggatgaatagaatagtgagtttctcccatgacctaccgacgcagccctgcaatattagggacacataattgtcctcgatatctgacgaccccatcttctgtaacctaaaatggtgtcttctccttatgaggggttgtatccttataatgagctaacacaagatcctcgtattggcgttccttcacttcagttactagagaggatgttgtcgggtcctgaatagtaattctggtatcacctgaatccaataatcgaactctaagactggctatatgatgaatctcgtgggctattcccctcttctctggctgtgtatatgacagactacccatagatctacggttgagggcatcggctactacattcactttgcccagatggtataaaatatcgacagcatagtctttaagtagctccaaccatctcttttgacgtaaattcaattccttttgtttgaagatatactggaggctcttatgatccataaaaatatcaacatgaatgccatacaagtagtgcctccacatctttagcgcatgaatcatcacatctaactctaaatcatgggtcgggtaattcttctcgtgctttcttagctgtctagaagcataagctacaaccttaccatgttgcatcagtacacacccaatccaacaccccaagcatcacaatagataacataaccatcgatcccttctgggagcttaagaactggtgctaaagttaatctgtccttcaatgcctggaaactctgttcgctaacatcagtccgctgaaacttagctcccttctgagtcaacttacatggatattctaatcttttataattcatgaaatccccccttttgaaggcccaaacgtcatcctttatctatcacaattatgccttattccattaccagggtagcattccacctcttctaaatgctacaagtcttagactcctttgagttcattcaatctattctgagctttctataacttatagaaactatcagctcttttattttcatgggcttaatcccgaggtttatccattctcgtcacattctcactcacattttcttactcatgtcttcctaaaccgtcgtcgctctaccataaaagcgtgtgacctacacatatctatttatacttattcgtaaccttccttcaacttgcttgcaccatagatttccttatgttattctggaacatcaagcgatacatcaaattgtcacaccgcttttgtcaaaggtgttgaaagagaaggaaattcctttacaagtctcctgtaataaccagccaaaccaagaaagctacgaacctccatcggtgtcgtgggtctaggtcaaatatttactgcctcaatcttttgtgtattaacccgtatagcttcacttgagataatatgcccaaggaaagcttcagaaattaacaagaattcacatttagagaattttgcatacgacttccctttttgtagaactttgagcacaatatacaaatgatctgtgtgcttagtctcttaacgagagtaaaccaatatatcatcaaatgtacaatcactaatagatctagaaagggtctgaacactcggttcatcaagtctatgaatattgcggtggcattagtcaaaccgaatgacatgacacgaaactctaagtgcccgtatctggtcctgaatgctgtcttcgggatatctttctccttaaccctcaccttatggtacccggacctcaggtctatcttctatcacgacccaaactggaggatcatgactagcacccgggccatacttgtcgagcaccaacgtacattttatctaactttctttattatctttaagggctgacgagatcaatataagtggtagatatggattatgaacaccaaacaatgaaagataatggaatgaacatgcataacatgggattacaagactgctaagaaactacatataaggtacgagctacaacgctgccatgaaagattatacgacaaaaattagccaacaaggcataccaaactatacatgggtcgacacctatctatgagcctctaaagaagcataagtgctgcaacattgccggaacatggccccgacatacccataatatctataacaaaaatgcataccaagaccacgggaaggccgaagaagggatctcgccaataaccgctgaactggaaagcctactgtggtgggggagctgcgtctaactgtctatcaggacctacaacacgacatgcagcatccacaaataaaaggacgtcagtacaaatgtactaagtatgtaaggcaggaaagcataagtaagaacagtaatgtaaacagggatagagaatatacaacttgtaacatctgggtacctctgagggctactgacatgaaatacgtgatacatacatatatatatacatatacctttaaaacattcgcctctgtgggcatcatcaacatcatatcgcacccggtcgtaatagtctcggtaaaacgtacccgaccacgtggagctcgataaaacccaactgagcaatggttgcacaataggtgtcgtacctggccggcgatagcgcggctcggtagagtaaaatagatatacatacatacatacatatatatatatatatatatatatgactcattggaatcatattttgaaccttccggagtaacataacgtcaatattctccgtacacgttattaggactaactcttcatcaagaatcttataaaaattaggaagtacataaaacattgatagcataagaataagagaagcaacctcaacatcaatttttccataagaagggcaaaggcactagaaaggccagctaatgagggatgctacaagtgtggaaaaactgaccatctcatcaaaaactgccctcagtgggaagtagaatggaggaaagagagatatgaaagaaagaacaggaataaggaactggtccaacccaagagaaccactacaaaggctatggttgcttcttggagggaaagttcagatgaagaatcagaggatggtgagacaaaagatcaggctctcatggcaataggagaatctgattaggacacttatgaagaaccagaggtaagtatctcacaacttaaaactaaaataaagtttttatctaaggagaaactctctgagttgctacttgacttcatagatgattctgaggaaacaaacaaagagagggatcaactatctaaagagtgtgcaatgctgaaagcagaacgcatggacttggaaataagggtcagtgaatctgaaaagaaaaacattgtcttgatgaaccaggtccatccactcaaaactgaaatcctagatttaatctgaaaacttaaaattaagactaggatctagtaaaaaggtggttgatcactctcatgcaacgttagaagaagacttagtaaaaataacggataaaatgtatgctaaggttgaacagataaaatctcttaaagaagaacttggcaaagtcaaacatgaatttgataaaacacgcaaatggaataagtcttctgatgcattaacttggcttcaagagaatcacagtagtaaccagagagggcttggttttgggagtcaattgcctaagtgggatcccaaaagcaagtatctcactctccttgaaaataaaatgtgcacctattgtgggaagaatggccactacaaatataagtgtggtgtaaaagagcatgccagtcagaaaaatgagagattcattaaaaagaagaactggctaccaaactgggccaggaaaaatctggttcatcctttctctcatagaaaaggacccaaactagtttgggttcttaaaactaacccctgatttacttttgtaggtacaagtgaagggaagcaacctaatttggtttttggacagtggctgctctaagcatatgacaggaaacaaggaacagttcctttcacttgaaaacctcaaaggaggaaatgtctcatttggaaacggaaagaaaggtgaaattataggggtcggcaaggtaggtaaagatgacacacgttcaattgaacatgtgtatctgatagatggcttgaaatatagcctaatcagtgtgtcacaattttgtgacagaggtaaccttgtcgcttttacctccacaaaatattattttataaatctgcttactgacacgattgtgttgcaggaaaggagaatgaacaatatctatgtcattgacttgtccacattgtctgacaatgaactcacttgccttagtgtgttggacagtgatcccctcctgtggcacaaaagacttggtcatgcaagtctgactcggcttaacatgctagtctctaagacttagtggtaggactccctaacattaagttcaaggaagacaaagtttgtgaggcatgtgcaagggggaagcaggtaagatcttctttcaaaagtaagaaaatggtcagtaccaccaggtcgttggaactggttcatctggatctatatggtccaatgagaactctgagcagaggaggtaagaaatatgtgatggtgttagttgatgattactcaaggctcacgtggaccttatttctggaatctaaggatgaagcatttgatatgtttatcacatttgttaagaaactcaaaatcagttaggacatcaactagcatcaataagatctgaccatgggactgaatttgaaaacgctaagtttgctaagttctgtgatgaacatggtatcaatcacaactaatctgcttctagaaccccacaacaaaatggggttgttgaaagaaagaatagaactcttgaagacatggcaagaaccatgcttctatcaagcaaactatctcacagcttctgggcagaagcaataaacacagcatgttacattatcaatagatgcatgaccagacctctggtagagaaaactccctatgaattacttaaagggagaaagcccaacatatcccaccttagggattttggatgcaagtgttatgtgcataataatggcaaagatactctaggaaaatttgatcccagaagggatgagggagtgttcttgggatactcaacacatagtaaagcttataaaatatacaataaaagaactatgtgtgtagaagaaagtgtacatgttgtctttgatgaaactaacactttatctgagagacaggaaccagaagatgaggagcttggactggtgaggagcaatgactacattgaagcacctatggtagatggaacaggtgatggaccaggttcaactatctcacgcaactcgacagggggaatactccatgaaaaccctggccctgatcttgttccacaactacaagacaacatggaacagtccagaagtgaacaacaagtgctcaaaccacacagatatcagagttctcaccttcttgagaacatcataacagacttgaaatctggaatcaaaactagatcctcattaaaaaatatgtgtgcgtttgatgcgtttctgtccttgttagaaccaaagaacattgttgaagccctacagaatgctgactgggtaaatgccatgcaagaagagctaaatcaatttgaaagaagtcaggtatggcacttggtacccaggccacttgacagagcagtaattggcaccaagtgggttttcagaattaagttcgacgagaatggaaccgttacaagaaacaaggcaagactggttgttcaaggatacagtcaagaagagggaattgactatgatgaaaccttttctcctgtggcaagattggaggcaatcagacttcttatagcatttgctgcacacatggaatttactctccatcagatggatgttgagagtgcctttctcaatggctatttgaaggaagatgtatttgtaaaacagcctcctggttttgaaaacaaagagtcacctgatcatgtgtataaacttgacaaggctctctatggtctcaagcaagcacctagagcttggtacgaaagattgtcaaaatttctgctggaacatgggtacaaacgaggaaaaatagacagtactttgttcctaaaggaaaagggaaaagaccttctgattgtgcaaatatatgttgatgatatcatatttggggcaactactgaaaagcttagtaaggaatttgctacattaatggggagtgagtttgaaatgagtatgatgggagaattaaccttcttcttaggcttgcaaatcaaacaaaatcctcatggtacaatgattcatcaacagaagtatgtgaaagaactcctcaagaagttcaaaatggaggactcaaaggagatagataccccaatagccacagctacaaaattggatgtggatgaacctggtccatccgttgatcagaagacatatagaggaatgattgggtctcttctctatcttactgcaagtagacctgatattgtgttcagtgtgggactatgtgctaggtttcaagccaatccaaaggagtcccatctcactgcagtaaaatgaattttgagatatttgaagggcaccactgatttgtgcctttggtatcctaaaggtagtaattttgaccttgtatgatatgttgatgctgattatgcaggttttctggttgacaggaaaagtacttcaagcatggctcacttattgggctcctgccttgtctcttgggcaaccaagaaacaaaattcagtagctttgtctactgctgaggctgaatatgtggctgcaacctcttgctgtgctcagttgctctggatcaagcaacatctcttggattttggtatttatttgggatgcattcctattttcaatgataacactagtgcaattagtatgaagaagaacccggttcatcacaaaagaactaagcaaatagatgttaggcaccacttcctaagggataattatgagaaaggaatgatctcaatcgatttttgtgctactggtcgtcaaatcgctgatatattaccaaagcactgagtagagagcattatgagagaaataggtttgaattagggatgattaagatcacctaactgaaaaacaaacaaaaaagttggaaaaaaaattggctagaaatccaattaggtacttaatcagattaatcattactcagcattatgtctttattgccatactcttttgccatgtattaatatgattccctagttgctaatgatgtttctttatttttgtgaattgaggcaaaataaagaatttatcaggatgaacctggttcatccatgctggtttacatgactgacaaggtacgttctcatcttcatacatgagcaggattttatctacttatggttcaaaatcaaattctctgcgcttacccaaattgaaccagtttcaagaagtcctatctcacttaattagcctagttttaggaggaaagtaactgtgcaatcaatgtctaatcaatgacaattctatagcgattagaattccacttgagttaatactcttccggtacaattaccccagccacatgttataaaaaggccaccattaccctttataccataaagcaagagtcgaacctcgttcaattcacccaacactaaaatctctactgcctcttgccctctttttctctaaaaattaaaaccatgtcgtctgcttcctctgattctcaaaatcgagattatgatgaaggagtctatgaatctgattctccaccggtctttagttctgaatcttctgataattctgtaacccctgaacatcacgatgccccaaaacccacaccaaaccctaccccagcccccaagcctcgtcgtgtaaaagttcttgcacgcaaaactgtggcttctggttcaagagccaaattcttggaagaattattgcatgctgaagaaggctctaaaccagaatcgtctgaagaatcatttaagtcagcaaatgaagatgaagcaactggttcaaccagtgctgaaaaaggtaatattgaagttacctctattttttctgaaaatcaatttgtgcttgtggggtctgtggtggataagtgccaagtaggcgaagaaaatttgggaaagagaaaattcttgagaacgagggagatgcaggtgtgaggggacccggagaggatggtaccacgcttgcaatttgtggccccattcttgaaaatcttgaagatgatgtcatggtgatagggggaactaatgaagttgaggaagttgttgttgggttggagaatctaatgaaggagatagatgaacgcgtttcttctggggaagaaactttggctgaaagactgaagaagttgggggactcataaaaccccaagaagagaaggactccaaagtccagaaagtctaaagcctcagttccttcaatgaaaaggaagactactgagtctgttagtgtctctgttacaaaggtacgagctacaagaaatactgtacgagaagaggaagagaagttggaaaaagctctgcaagagagcaaaagaaaaagggcagagaagggaaaagcaaaggtaggggagcatgttgaggctattgttgttgaagaagagatgttggacttggtccaacaagaggagcatctggctccatctatggttaggacaccaaaacccaaacaggctaaggcttcttcaaaaaaattcaaaaagtgatatttataacctattgaccctagttcttgatgattaatgcttaaaaatatactaagtgtttaaagtgtatacaggataaaagcacagagtttgtcatcatctaaaagggggaatttgttggcccatgtcactgaatgagttttgaagattgacaaaagatgacaagttgaaccaggtccatcatagcatacacatctgaacggaacagttggtacgagaatcatacttgcatgggagacatcagtggttgatgagtatcaaagaactaggagaatgtcttctaatacgaaaaggttgcaaactaataaaaatgacagaagttgatttcagctaggacagaaatagaggaaggaagttgagtttcaatcaaactcaagtataactggtgaaattattgacgcacaagtactaaagtgaatcaagatctgaagaaaaattcccagagatattttgcaaacagaattgttgtgcgatacaaaggctgtgttcaactagaagaaacagttccatcgtttgtgtattgagtctaattgattgtagtaggagttttaacattgtatcttttcagctttcatagaagcaattgtaatatacacattgttcaagttagagttagcttgaaatctgtagaaattagctaaaggctagttgatacaaagatgattagagttagtcctaggattacaaaagagtttattttgtaagtccgttttggctcagagttttagtgaagagtttgagcaaatcctactgaggagtaggtcgtggttttttcaccttttgagccaggtgttttccacgtaaaaatctatgtgtctttacttactgctttaattattctgcaatagtagaaagtagtacataaagaagaaccaggttcttcttattagacatcactcgaaaattgggtactacacaattatcttacattattgtgtagtattgaagtctaaaacatcaaagagggtagtgaggaatagtgaaatcccgtaatgaacattctgttttgggctaaaaatataactgggcataattggccttcgcgatcgcgacaggtctgctgcgatcgcgtagagtactggacctagaccttcgcgatcgcgaagaagagatcgcgatcgcggagtttatggacacggaccatcgcgatcgcgaagaaggggttgcgatcacgaagaacaaaatagtacccagcccccaacccccatttgcactacgcgttcgcatgaggcccttcgcgatcgcgtagagcactgacctcaggctctgcgatcgcgactgaggccatgcgttcgcgtagggttaattacccccccccccccccccccccccccccccccccccgcgactgactcatcgcgatcgcatgcaaagcactgcgatcgcggagaaggattaactggacaccagaaaacagcctaacaccagatatttctaaggcattttgcactccgacacctacctgaaactcacccgagccctcggggctcaaaaccaattatacaaacaacctcaaaaatatcctatggacttattcgagtaatcaaaacaccaaaataacatcataaacatcgaattaaacctcaaaatctataaaaaattctcaaaacttcattaactttcaaattttccatttttagaccgaatcacctcaaactgagtccgtttcttaccaaatttcacagataactcacataagacatatttaacctgttccatactccggaaccataatacgggtccgataacacaggtttcacatcaaatttcattttcaaaagcctttatattttcagaaaataattttctttacaaattcatttctcggacttgggacctcgaaattcgattccgggaatacgcccaagtcccatatttttctacggaccctccgggaccgtcaaaccacggcttcgggtccgtttaccaaaaatattgaccaaagtcaacctcattcaattaattatcataaattcaatattttatcagtttttcacataaaggctccccggctacgcgcccggcctgcgcacgcacatcgaggtgagattaaaggaggctttcagggcctcaaaacacagttttaattaaaattacacgggatgaccttttgggtcatcacaattaggcttgtcttgaaatttatttatttgagaccttgtcatgggccttcttggagcttccagagcttcatccttctcctttaatgatgttgagttgccatggatgctatcaggaacccttacttcctttcattggcgtcgcgtttgcataatgttctggaatcgtagcatatctgtaggatttgaataagtgtaatctcatccctttctcatttttatcatattctttctttaccattccatagttactagaaccacttaattctgacttaataccacatcactccatattccccctttaggaaggtgctaagattcagtgatacggtgatctacgtatagatgcaacgtgcactcggtaccttactcaacccatttaatgccacatcactccatatacttctgtcacaacccaacctgatgggccgcgacgggcacccggtaccttactcaaccgagtaccaacgtaacgtatctttcttatcacatcatcataggtaagtgggccagaagggctatatgaggtaagaagaataaaacataagagaacactctacataaaacgacccaacctgatatactaccttatacatatgacgtacggacctataaggccaaagtaatcactcgtatgctgaacataggccgacaagtccatacaatctttcatatacatgacatatgtctacaagcctctaagagtacataaatgtcataaggccgggacagggccccgacatactaagcaatacatctctaaatcataataaccaaataagaaactccagagaaaatggagcgcaccaacatcttccgctgagctgatagccttcttgaaggactctcaacctgtctatcgggacctgcgggcatgaaatgcaatgtccccgggaaaaagggacgtcagtacaaataatgtaccgagtatgtaagtaatggaaatcagtaaacaatagacatgagagaaacatggagtaataatctcaacatgtatatttgaatagctttgtgaattttttggtattataatgtcatgcatatgcgtataaatgtcataccatgcatgggtatatgcgttcataacatcatcaagcctctgaaggcatcgcgtcatatcatcttggccactgtgggtaaatcatcaaggtatactagctgatcaggtggtggtgtgtataacgccgtgacctttttctatatacatataaatacgcgtatataacgtcatctggtcataggtcaatgtacatgtatataaataaatgcaatgtatgagaagtacgtcaataaaatctctcggaatgtcataagaccattatacctctgattaatatcatgaaataaactttatcaactcacgtgttttctgagacccataaacaggtgatagaataatatgacacattgggaattaagaacataaacatctctagtatttctatgaatagagtcatttatggaaattgtgcatttgctcgtttcgtttgtgtcgtatagatcatgccaaaagaaagaagggatagccttaacatacctgagtcggttctcttgacaatccctctaatacacgtcaattgtaacaacatgtaatcggaaagattggagtagaaaaatattcatatgatatccttgagaaagattgcaccgtactatcttagaaccgcaaaatcccattgttgttaccttatgaaatcgtatgaatttttgtagcaattccgtatgatcactttgtgaatttgatcacaaccttgtaagatacttactgaagcaatcacttcgagagtctttatggcttttcgtgaatttcatatctttgtgaataatccaaatcttcaatttgagaagttgttcttcaatcacttctttaaagattgccaccttgcaaagttattcaagagtcacttaatgactttatgtatgcggttgccacgttggggaaatttcccacccaatagttattcacttaattttttaattaatttattagtctctcattaatcaataattacccaatttttcatataattaagaattatctcaaattacttaaaatacgattcatttttaaaatactttgtacaccttactatcatggtcatgtggtactttgtatgttactagtccatcaataccgtattatagttcagactgtatcccaaattgtcaaacttcgacgaaactcattttcttcgattcacctaccctctcatcttcgcaaatttacttatcacttgtttaaaatagcataatatttataatcccaaaataatttcattcccgaacttacgtcgattaacttacgacaaaactttaacgtacaaaaatacggaatgtaacatctcatttccgaggcgtacttacacgtacgaaaacatgggatatacagcattactccaaaatatgacatctatgcaagacttttaagagtcattttaattttaaagggtgctgccacggtttttttttttggggttgggggggttagtcttataccataacttcttagtttattaggtaatatcccgttacccaataattgatcaattaccaacataattaagaattatctcaatttacttaaaataccgctcacttttaacataccttatacaccttactattatggtcatgtagtatcttgtatggcactaattcataaataccgagtactgtagctcggaccgtttttatcccaaatcgacaatcttcaacgaaactcattttcttttattcgtttaccctttaaccttcacgacactttacttatcacctattataaatagcataaatgctcataacctcaaaaataatctcatccccgagtctacatcgattaacttacgacaaaagttttacgtacgaaatgcaggatataacaatgactcttgtagactcaagaatacagtgtttgtactaagaactagaaaggtttagaaacagattgtgtagttgcgtgaagatcaacatccttctacttcatcctttatagcttcatgagtcttctgtttccttgacttctaggattatactgagcaattttagaaatcctttccttgtgaggcatgtacttataagagaaagacccaagggctgcctcatgaatctagcttgaaatggtagctagattcatctctctttccttatgattgatttcttgaccggagataatcttggttgattgcttcaatcttggcggcttgctttcgtctttccttcatggcttgagcttctgctgaatcttgcaggtttgattgatgtccgtgatttgctccatttttgcacatttgaaaatgaaaatcagtgttgattgattcccttctttttagactgactgatttatttaccatataaggctatggttcaagatacatagtcgttgagtggatcttcattccttttagcaatgttgttgctcaccagaatctgcatatcattagtcatgacttttttagggttattaatcattattaaaattctaaacttaacggtcctttcaccaagttcacataaatcccatcggaattacattactcattccttgtttcatttggcttcatatggttccttttggaagtatcgtatatctgatactcttgttaaaatatttcaggcaattcatatattttgaaggaaaaactaaaattccttgtcacagatgttgttgatggatcggaggactcatgaaagtgcgttcgtgtgagattgaataatggagggaaaaatggaagggtatctaatctaaaataaatattagaatatactattcaaaccaacacaaccataatattctaaaaaaaaatataatattcaaatcaaatataccaagatattcaatttgaaatatagtattccaaccaaatataccattatttcttatagaatacaatttcaaaccaaacataatacaatattctattttggaatacagtatccaaaccaatcataccaaattaaaatatttgaagagtacaatattcaaattaacataccacaatattctaataaagaatacaatattcacatcaaatattgcataatattttaatattgaatacagtattcaaaccaaacatatcacaatattctaatttggaatactgtattcaaactaaacatacctttatttttatttatgtacatattttattttacttgaaatattaacatgctttaacaatatacaatgactagtaattttttatcgtaaaagaaaatgaggacaaaggttctcataaaaaggttttatttcatagataatcttttttttttttactcttttaattttggtccatgtttaaaacgagtggagtatgattttgactcgatactccatatagatagtttactttaatttagggagtaagtttattgggtagttataatcctttcactaaatggatatttagggaaattaattaataggtattaggtttaatttcatgattgaaatatattgtgttaagaaccctttaaccccgtgtaaactttccttaattaatttgagaaccatccagtttctaagcaaaggtgaaagtatcatttactatatcatctaaccaaatatctttaggcgcaaattgctacaattgttctcttgctgaaattcacgtttaattgcagaaactaatggcattaataaacaattatgtattttgaataatgcgttaaaattaataacaatcaatagtgtgtttgataagattaacatattttttgctaaaatcactgaaatatcctttaaaacgatttataataaaaaaaattacatggagaaggaccgaaggcaaaaaagttaccagaagaagttaaaaattttgttcgaaaatgctatttcatggattatataaaaagcattaataataaaataataaaaatctttgtcaaacaaaaaatatcctaaattaaaaaagtataaagaggggcttgatcaacttacgacttttgatgattttggtttattaacatttactcattcaaacactagtttttacgtcgaatcaaatgaatatcactgaaaaaaatcatttgagttggagttaaattgaagttccggttgataattactagtacttcatatggaccatatcatcgtctttggcgcctaatcttgaaaatctcaaactgaactcaaaagtcaaaaccccaataagctgattctgaaattttcgaattttcactgccgatagattttatttgaagattctattattaccgtcaaagaggtatcctctaatttccagcaatctttctgtatatttgcagaggtcaatacctatatctgttgttgttcctataattcgctatgttaaatttgagttaacgtattaatcaatgattacataaattgtttttctttctttgatgcttcattatatcttttttactgctgcccgagtatttaattttatgtatgtttgtccatttaggcagaaatgtcacctggtaaggccataattagcatctccacttgggatggcaccattacatctaatgattttcacgttgctgctgctaattttgctgagcaatggaacaatttagatctagggtttcctcactggtcatggatcaactgtccaaagggaccacggtttgcttctagcaaggttgatctttgtgcatttgctttatatatgctttcggcgtgttctatatattaatactacttgtattctgcaatttgggcaggtagaaggatatttatcattggagaatatgattcttccccaatctactgaggtctgtccttggaacttcagtggagctatattattgagaaaaattagcataagaggttactttgctgatttttttgtcttttttataggaagatcgaaatcattgtggtcttgctggaatagaagatttgagttgctctaatgaagatgtatttatggatactgctatattggtatgttacacattttatttcttgaagtaattctgtttatttggaaaaaatatttatttcatggagtgctcgagtttcaaaatatttatcttttactcacgtgttggaggttttaacagggactttttcttgtttgaactgctgaattatagcaaacacaacttccagaagttttgtgcttccttttggattaacatttgcgtcttcggcagaaaacaactaattgtccaatctcttagttcacacgttaatttcttggaatcagacaactaagattcgtgagtttatgtattcttatatttagcatctttataaagctttcgattggccttatcaaaaaaaatagaaaaaatactttcaattggatacgggtgctaatttggtagatgttggtggtcttgtcaacagttgctcctcttttaagtactaaaactgcacttgctaagtatgtatctgttgccttcaatcttacttttggaagggagggggggcatgcatcaatgactttgtgtctcttgcagttccattgtcttttatagtttcatgtgcaatatgtagttgtcaacatttacacacatatccatgctccatcttcaatgccacatacaatatttcagttttcctcttatctttcgttgaaaaataaatggttggacattgacgtgatgtttctcctttaaggttcaaaagcacaaccaaggaagacatcattatgacttccatgtcgtctacagttcctctttcagggttcccgtgctatatttccgtgcatactgcagtggtatgcttgtctatccattttatgccgaaaagaaactgaataaattagttctcttactatttttggagtatttgcacgggtgcaacaatattgttggagaattcgcgcaacacagtttgtagaagcatctgtcttgtgatattataaccatgctttacgacttgattgctacagcaacactattaattaaaaacaagatagtagcttcataactgtgccactgagatactagtttgtaaaattttaattctgaagtaaagcagaaaattttggttagacaaatcatgatgagcttgatacgtgtggaaaagatgatgacgaatcctagtctcgggtcaatccaatgctctgcgtagttttaaattctgcctctactacttgtttgctgtatacttcatacttcgttgtatatcagtttatttgtttcattaatcacttcaatcaaacagcaagctagtctgtatttgggttctgatctgctattctttctcagctaatgcatgataacttatataccagcataaatattgttctgatcgtgctacatccatagatggagaacccttggcaatagaagacctggaaaaagagtttcctgcctatactacacaggaattagcaatatctaaatggacctttataactcaggaggtatattgcttcttcattttttgtgctttacgaaaactgaatacattctcttggcttgtgatttctattagcacttggtaaatttacatggcttcaccttctattaaagaaaaaaaaagaatttttctaaccgagccagcttttgtgaaacacttctgatctatttcctctttctcaactcacttacctatcaatacctaacaccgttgtatctcgccagataatccatttgtgttaattgctagactagtaacaatatccatctcacttgccaatacattttagcctcttgccgccatgcatgaccacaaaaatcagggtctttcctcatgaaggggaggaatattgaaacagattgctgcattttaactaactgggaagaactgcaacatatagctatgatttactattccctggtcgataatatgtatacttttagtagtattcaagaatgtttggtggcatttagttgcagccaacactcatagctgctgccaatttcgagttctcaagtattctcagtggaatccttattttctggttgagtctatcggaatgtcaaggttccggcaaaattctcttcaaattatatccccagtcctttctagtagatgtcgaatctgcttggatgatccttgacatatcttcatgcttctcacttagtgtctctgcttcttttttgcttggtttcttccctaagcctccttcaccagtaaaaagtaaaagagaagtaactacaattaaagctaaggtatatattaggctttgtttgtcttcctggtagtgcagtttgcttttctcattgtatcttcttttaccagttagcatgaagtttgtcagtgagaaaaaaattgcgttaacgaatgtgcaccatgtttagatccatcttaaatctaaatgctgaactatctgtaggagcacccctatctaaatcgaccatggtacacattacatccatgtggaactagtgactggatgaagctacttttcagtaatgaaccttcagtggtgtatcaaggtggagttgcagttgagaaatatcttatctcatggttttcagttgtatgtccaatctttggtcttaaaatccccttaaaattgtttgtaaatgcgtctaacaagtctgaaaatgtttctaatgtaatatagattgagtgttttcttgtcaacgtaaatgttcttttgaacacaacagcaaaaatgaattcatctgctaagaggcaaaatataagctgttatgtagtgtttattaattattattttatgtcggatgttaggaactattgattctttacatagaagtaaccttaacatggctaggccgatcaagttttcaattttagttagcatgtcaaattttcttctacgagcttatctcacctttcatggcccctaagatgtacgttggtaaagagtgcattcagattcaaaacatcagactacagtacaatggtttacgttttaagtgtacaatcatctcatttaaaagttttagttgctagaaggacatatatttacttacactccatttggatcattgttccccgtcgttttataatgtattacgtactgtattgtatcgtatcgttttatgaatacaatgtttggatggattgtattgtttgttgttgttaaataacattttgctgtttggtttgactgtatcgtaatgtactgtaactgataagtttactaaaataccctcaattatttcaaatatttaatttatcaagaattacacataaaaattatttaagaaaacccatttctgctaatttatcactaattatgtcttatatataaattaagcaattaaattcatgcaaattctatcgaaattagttgaacaagttaataatattataaataataataagtacactacattcataattagatcataataataataaatttaatttttttttttaagtagactctattcagacaaaagtaaaacaaaacctttacctgaagagtatggagaagcagcagaagaacaaaacgagtttttcacgtatgtaggttattttacaggttatatttgggatggtgtctttgaaaatttatataggttattagacttcacgtagaattctattatagaattatatgagaaagagactttgctattatttaaaataaaaaaaggtaaagggtaaaatagaattataaagtaataagttagggcgtaattagaaagaaaaatatgaaacgattccaacacaccaaatcggttgtttcaaaaaatgggacttttcattgttccgaaacaatgaatttaacaatacaatacaaccaattgtaactgaacaatcaaaacaaacattgttatgggaaaacaatacgaaacgatacaacggataacaatcatccaaacaattaattatatcttcaatatgtcctctaacatgtgaacttaattcttatgtggaaattcttttgaaagtgagtgagacagagtgagaccgaactcgaaagctctaatactatgtaaactcgaaacctctaatactatgttaaattaagtagccaccttgatgaaagtttaagctttttagaaagagcgcacctttattatcaaataatgaaaagcacttctcaaatgaattgataaagctattactatgggaaagtacttatggcaaaagatattttaacaaaagtgctatccaaaacaaaccgattttacaaagttggccaaaaaggttctgtctgcagacaatttagattgactttatttgatatgcttcctacctgcattccaagctaaatcttagcaacttttgaatgtttacaccgagatcatatcaaaatatcagactttcaaagtgatctttctgttttttccttccttttttttttgtgagctcatgcaccattattatactttcaaagtgacttcatgttaagctttgcgatcctgtacatttcgaatgtggaagcgttcattttggacataccacacaggtcatttgcttggagaaaatcaacaggcccaagataaaagtcatcgagcatacttatgatcacgaatttctcgttaaactagaacgactccgaaaacggaagaggatcatgcaaggaaaccctcgtacaacctgtattatcctcaccctgttcaaggtaatggggcctaaaatataccattgtgctaataagcattgatgaacagccatataacctttgcaaacgtatttcagtactaaataattactacgcctcaaacccaagattggagcagctatatgagagctatcactatccatgtcgctccatttaaatccgtattccaatattttaaaaagtagtagttatctagcacttacaaaggtatttcagtagcccatattttttgccttttggaaatgtagtatgaaccatgcattacattccattgccagctgacaatgtataaacaggtaattggagaagaatactattatcacaatagactacaagttacagatggacttgaaattcacattcgtaaaccagaagctactccatgtgaactagaaagtccaacccccatcctcttgctgcaagtgttgtcatgctgaacgtcgccaaaacttgagttgttcactgcttatagacaaaatgaagaaaggaccaaagactcataaggcccttccatctgaaaggaccaaaacttgaattctggttccatgtaattgacttgacctccaagccctttggaagctgtgctctttaatgttttcggaacgacatccagcatgccagtacaatacatgtttgatccaaatgttatgtaggctcattgtttttcgacttcttcactaatgactgcttgtcgactgaagcaagccagaaactctatatttccttcagctccttttagaggtgattcaatccaaccattgcattgaaacccatggttctgtaccccatttatgatcttctcaatcacctgcacaacagtaattatcgtgacaacagtaacagtaagaacaaggaatttctgttataagcaagatatgtgactaggagcattaacttcttgttttctgttatttttcatactaaaagttatggtgtaccaaacaccaaaaatgatttgatattgggaaaaggagatttggggatctcaaggaaggaacaatagaataaagtgggacttcagcatctccagaatcccctctagaaaggtttgtagtgcaaatatcaactaaaccttacttcataaaaagccaagattccgaatacctcctttgatgtcaaaatacgctaaccccattaaacaatggtaaatctactaaaaagattgagaactgataactcaaaccaaaattgacttctccaagaggtgagccataatggcacatcctgagcacaaacaagcagacagcaaaaacaaaagcaacatatccgcgacatcattcagttccataacccaaaacagctaagatgtacagccaaaatggaatgctgcaattttctgtatataccatagctcttctcttccctggttacttagcttttcactggctttcccatatccaagctgacagaactttccatctctttatccaaatctaagttctcactttttttcaccctttgtcagttggcatccatcagagtcagagaaaaacttaacttggtccaaaggaaaaattaaaatgtcaggagacctatttcccatcctccagcattccaagcatccacggaagatttatgggagtcaaggagggaaagaagagaattatgcaagatactagatttactttaagttgcagtatacttcagtgattaaaaaagcgctcgcttcctcgcttggagcgcgaagcgaggtgaagcgtgaagggcatcgcttcaggcatcaaaagcgactcaggtaagaaaagcgaccgcttctctgtaaaaagcgagaagcgagaagaagcgttagaagcgtccgcttctttgtttaaaatacccaaaccctattttattaaaaacgtggtttctaaacactgtgtggacttcttcaacagcagcgtcaactagggttgttcttcttcttcttcttcaacagtacaacaacgactttcaacatgtatgttctgcacttttgattttcattcttcttcttcgtcttcttctttttctttttctttttaaacgtccaaaaagcgccgaaatgctggcgcattctttttttaaccttcggttctttatcataaatttttttcccaatttgtatatcctttattcttagttcttattgcctttcttatgtgttatgtagttgttcttttaatggcgccaaaagaagataggaaagacccggcttgggcttactctgcaagagttagcgagagcaacaagatggtcattagatgtcttttttgtgataagatttcaaatgggtgaatctatcgtcaaatagcgcatctaatcggtggtgatccaaatgtcgcatcttgtcctaaagttccggggcatgtgaaggaagaattgaaagcataccttcagaaaaaaaagagtcaagacttaaatgattcatgaacaagaactttataatcttgatgatgacgatgatgaaacagaagaaggtgatgatgcttcgccgcttccaccaaaatcacaaaagcggggaaggatgcaaccaatgtcttctagttgtggatctactggcaagatcaaaagtcttatggattgttactttccgcagaaatccggagataggggagaaaaaagtggtaatcctcaaattgatgccaaagcgattttatgtttgcgcggtggatatatgatgcaggtcttcctttttattgtgttaattatacagacactttttctgctttaattgaggtcataggccaatatggtccaggaatgaagcctccaacttattatgaagttagaggtccatatctaaaaaaagaggtggaagaggtgaataaaatcgtggaggagcacaaagtagaatggaacaagtttggttgttccattatgatggataagtggacggcaagaaatggagaaatgatcatcaatatcttggtgaattctcctaagggaagcctgtttcttgagtccgttgatgcaaacgactcttcgactgattcaaccaaaatgtattccttgttcaagagtacaatagactctattggagtagaaaatgttgttcaagttgtcacggacaacgccagtgaaaatgttaaagttggtgatttgatgtctgttgggtacccgcatatttattggactccgtgtgcagcacattccattaatttgatcttcggtgacattttcaaggaaaggcccttcagtctttagtcaggcaattagagtgcattcctatattgttcaaagacctttgttattgaatatgacgaagagattcactaaacaaagaagcttggtgaaacgtgcaaagacaagatttgttactgctttctttgactttgcataggatgtatgagcaaaaaagcaatttgaagaagttgcttgtttcagatgagtacactaacagtgcctatggaagggaagctcgagggagagaatctacagatattatactttcttcttcaatctggaacaatgtggttcatgcattgaagattggtggtcctttagttaaagtgtttcgcttggtggatggggagcaaaggccatcaatggctacctgtacgaagcaatggatagggcaaaggaggctattcaagcctcttttagtgatcaaagaaaatacaaaagagtctttgagatcatagataaaaggtgggatagtaagcttcatagccctttgcatgcagctggacttgttttgaacccggaactgttttatgacaatgaagagaggattctaggtgatgaacctttgtggaatggatactatgaatgtattgagaagttgatacctgaagaatccgtgcaagataaaataacagagcaatttagtatttataggaatgctgagcaactttttgaaaagaacatggcgattagacaaagaaagacgaagtcaccaggtgagcaagtgcttatatgttgttttatagttaataagttatttctttattaatattatgttttgaaaatttgttctacttctacagttgaatggtggaagcaatatggccattccactccagatttacaaaagtttgccatcaaggttctaagtctaacatgtagctcatccgggtgtgaaaggaattggagcgtggttgagcatgtaagaagtaagaagaaagatttggtatattgagataattaaatcatatctcaattgtcttaatcttactaattacttattatttgcagattcataccaaaaagaggaacaaactaaccttgaagcgtctcaatgatctagtcttcattaagtacaatagaacattgaggcgtcgttacggcgctcgcaatgtaattgatccaattagtttggacaacatcaatgatgctaatgaatggctaactggagccccagaagatcatgcagatgaagaagtatttgaggatacttcttatttcacttggggtgatgttgcggaggcgcgtggaattggggagaggatttatggtttgagggggagtacctcaacttcaagttctacgaggaagggaaaagaggcagctactttgtccctagttgatgaagaagaagaagttgaagaagatgacgagcaatataataatgatagtggaatacaagaatttgacaatcttgtagaagaataggatgctcattttgtgctttaattgatgttactctttagttttttaattgaagtattgaacatttgcttacaattacatgtgttgtctatgcagtatttattttatttttttaaattaattccgcttcatttcaaaaaagcgagcgcttcgcttctcgcttctcgtgaaatgggggttgtcgcttttcctcgtttcacgctcttcacaacactggtatactttaatttattttaccttactatgacttcactaccagtaattatctcatgtaaagggtcggggaaggggcggactacaagggcctcaaatagaaaaacaaaaatcattatagccctgaacgaaattgaataaagcagtctaacgggctacttccctccaattgacctacttattcagccttgtcgagcggcccatcctagccatagaagtggcactgtggcaattgttatgcactttgtccataagctgccaagctcagttcaacaaaaatgcaaaaaggtgtcgacgtttaggatgctggactggtgctgagcttatctactgctttccccaagtgtgattttatacaagatttaattttcttgtggtaaccaaaggaaaatacagagaataagtacaaaaacttcacgggaaacgttttaccataacatgaattgccatgtaatatatagagagaaaagggcagtgacgaagtagaattttgttttatacaagtatttgtttgaaaatgtatcacgttaggataagacatcaggaaacagaatgagatatcttaacagatatcaaattttcgaacagataaatgtagctacttgtctaaattgctgtccgtaaagtgcaaatgtcatttcttgctaaaagaaatttctattctctcactaaccaaatgtatttcttggcttttaatatttattgactcattataaaagttggaataacaatcagttgcttccatatagccccgcatccctccttaaagtagccaagatactagtattatcataagcattaaaacatgagtttaacaatccgattttaagtcggaaataaagcatcaaaagtaagcaaatgaaaaagttgcgcaaatgcatacctcttgatggactgagggatctcttacgattccacctcctccaacctaacatgcataaagaagtctacgtcaaaatgcataatcttctagcaaaatcaatcacaaaattaacacagagctaactcttaagaacacaataaaggccaaccactcttgagtgcaataccagtacaagacttacagatacgtgcaaatgattgagctatcagtggattatttatgactatgaatctaattgaatcaacggtaggcttgaaaggtatatgactaagcgataactatacccaacatttccacatgtagaatccgtaacatgcaaaatcaaccacaaaatcaacatacagatcatccttaagagcataataaatgccaggcatctcgaaagcaatataatacaagacttcagattaaacaaaatgattgagtttcggtttctgattgagccaacacttggcctcaaaagaatattaacaagctaataataccctatattttcaaatgtagaatcattcacagccaaacacaaacgagagcaccacctcaagaagctcatttcatttcatttgcttggagtgagtaagctcaatttaagacaaactgaaaatttcaattctgatcaagtttcactaatttggtccacttatcaagtcaacaaagtactctaccaaatctagtccactcaaaatggcatattttagtacatttgttgcagacttatataaataaataagaagtttctccatgctaacaatttaagcttttagacgaggtcgtcacacaattcaacatgatattaaaatatgtgtttaagtctcatgggcaccatcaacaaaaaatatattcacatgcttggtccaagaaaagtatcagacccacacatagggagtgggggatgtcttgtagacctaatatagataaacagaaatgtcagaaatgtcacttctctgatagcttaagcttttagatagaatagttacaaaattcaatatccatctcaactttcttcaccatagacacagtaaactgtaaaacatgaaaaggattcactaatgaagtacatcagacacatatacttggaatttatgtgcacaaacaagccttagagcctgaccaatttccatctctaagcaagtcaagtaagagctttgagttatagaatgttggtaagaagtgacatttttacttattttatattagatctgcaatgggtatcggaaacagtctctctaccttcacaaggttagtaaggtttgcgttcatactaaccctcccctgaccccacttgtgggattacactgggtttgttgttgttgttgggtctgcaatgagtcacttcttctcaagacataataacgctttacaaacgcagacagaatgcaggatctatgagaaatgcttacttgggatctccgagcctcaaattgaggtttaatcagagtaactaacgtagcttcttccttcatcaaattgacaactgcaggcataacctggataggggaaatgaacatttgagtattactaggtattaaccaggagcatctgtataagaaacattgctgatctaccatctacagatatggaacaacttatatttatatgctaaaccgttaaggtaggaagttgcatcaatgaaatcacattggaagcattttcggatgaaaaagcttaccagaagtatcgaaataaaggagaggtccaaagttactaaatcgactttttgccggagttcggaaaggtatctcaagtttgtacgctcaataacacttacacgctcatctcggcgaattttatctgccacctgtacagaaatcagcaagcctttttgagaataaaaaaatcaccaaccctttaaaatttaaaatttaaataaccaaatggtcagccgatttgaaatagatccagggctgcttggcaactaattaaactcaaagcagtgaaagatgttttctagctgccaaaacaagaaggaattatcattactcaggatttactgagctgttgaacttaaattcagagcatactgaaaaatatttaaatgatggtacattctattgatttctagttcaatgctctaggattttagtttctaggcatctcaaatttgatgatcgtgggaccttaaattatgtgattgagtaaataccagtaaacaaaactttaaataatagaagctttctgagcatcagcttttaattctggtggatgttacctgtccatatcctacatcaactccatagacaaatgaagcaccatactgaagtaagcaatcagtaaatcctccagtcgacaagcctgaatcaagagctactttccctgcaacatcaatccccaggttttcaatagcagcctctagtttgtgtcctcccctgagtaaacatcaacaagcaagtcaaatagctgcagagatctcagcaaagtacaaaaaagggcagcccgatgcactaaggtccaaggaatggccggaccacaagggtctatctacacaaccttacacaataatataggctcagagaaggaatattcacctgcacacatatttgggaacttccgccatgatctccacgacagctttatcagagatttgactccctgctttgttgacgacttttccgtccacaagcactttgcctaagctagaagatcgtcaggagttacggagatggaggcagagagacaaaagcaaatcaacctctagtaaggatatatcaacttgacggcaaagtagaaacaaagaagttacaataagttgtcaacctgacaagaagagaaggaactcgaaaacaccataagatgatttggatgaagtttatgattacatattaatgagcctgaatgggagctttacatgtctcaagttgagatacctcataaaacaaaagactgagagacactaaagagtgtatgaaaaaagaaacaggcattctcttcaggaagaccaataacatacacgtacaactattgacatctgaaaaacaatattttagcattgaccagaaatctgttaaagaactacattttctgatgatagctagactattcttaaacagactctatcaagctaagctattatctatgttgctcgaactcgggtgcgggtatccgatccggatgtggatctaaaagtcggattcagtgtttaaaaaagcgcccgcttcctcgctttaagcgagaagcgaggcgaagcgtgaagggcagacttcagccagatgaagcgactcaagtaagtaaaagcaaccgcttcccactaaaaagcgagaagcgggaaagcgaagcgactgaagcgtccgcttctctattttaaaatacccaaccctatgttaaggcttctattttggtcaaacagtcgacttctttgccaaacttccaacagcagcgactagggttcaaccctggttgaaagtcacttcttcttcttcaactagggttcaacactggccgactacttctgacttctgatttcttcatctagtcgacaatcactagcgactaggaatcttcttcttcaacttcaagacttcaagacttcaagaggtatcttcttcttcttcttcttcttctttctgaacgtccaaaaaacggcgaaatgctggcgaatttttttttaccttaggttctttctcagaaaattgctggccagcttttccagtttttaacagagaattcctctatgcagtatttattttaaaaataaaaaaaatccgcttcacttcaaaaaagcgagcgcttcgcttctcgtgaaatgggggttgtcgtttttcctcgcttcacgctcttcacaacactggtcggatccttcataatctaaattttaagattcgagggtatggatccaggtacggatacgagtgcggggattcggctaaaagtaactcaaaattctaaaaatagatctataaagatatcctaaattatgagaaatattttgtggaaaatttaagttgtggagtgcagtcaacaagtcaatctttcattttgggaatttctcaagttgtaggcactagcaagcagcaaccaaaattcaaattagtccatggatggtggttaaagtacccgatctcgattgaccacatccagtaagaatcccacacccttatcagtactagtgtcgtgtcgaaacgggtgcggcggctaaaataaagagtccgcgcaacatgggctattataccttgtaaccgtaccatatagactctactcaagcaatgctattataccttgtaaccgtaccatatagactctactcaggcaatgctattataccttgtaaccgtaccatatagaataaaagtctaactctaaacagttcaaaccaatttataagaacagaaagaagaattctctttactctacaatgagctgggcgaaaatcaggtttgataaccaaagctcaaggtcactgagcaatccagatgttttatttattagcaaaattaagtgtcaaatacgcttgaagaataacaactaccttgtagaatccatgactgtataaatgtccggctgtactgctgaaatctctcaagacacagttcatcaagtctctttttcctaatgaaaccatacaaacacttagcagcaaaatatgattgtagggaaaagaccaataaaataaggacaaattacagcttaaaccattgtctgagtaattagaaaaaagggtaccagtcatgagcagaagtaaggacaaaccttttccagagcccaaaaagaaaagaaaaaaagctctgttgattgatgccatcacctagtagttgatagacccaagagcttggtagagcatactttagttaacatctatttgtttcaattttttctaatacaggctttaatattgcagttgatccatagcatgttatagtatctttaagggcaccctcccctcccgatatcagtaatgtttagttggtatacatggacatgctttttgcttgttttcgtactttttcttaaaagctgctaactcttggaataatgttcaaaagaaagcacattttggtcaatggagtaaattaatacgaaaccagaaagaagagagaaatattactttttctttggttgacccttctccgcggtcagtgaagcaaaggttcttacagaaggatgattgcgggctttgaactcgacccatctcgcttatcaataaaagtacagaatcttatcgtcagaatcttaagtcgtataaatccaccaagaaaaagtaaaagtctaagctcaatacaaaaaacggatatagaatttaagccccacgtagcagctggacttgaagagtagaaaaatgcaatcttttcaaaaccagtttcaacagagactttggagtaccagagagctttggagtactgaatggtaaattgcaggagaaagagaagctattgctggagctgcaagcacagtaacagcgtgatacgatgatggatagcttcagtatttgaagcgccattttctctgaactctgcaaggaagaggagattaggagacggagattttgtgtaaaaacggcgtgggtaacctcacttctctctaagcctgtcatctggtctggcccgtcccggaccggcccagccctgcgagcccacatggactccgtgctaaacgggctggcccgtatggtcggggcccaggcggtcacaggagcctactgtgagccggtcttgcatggaggaaccgcgagtccgggatcggttggcgggcctgggccggtttaaccgagcccaaaagttatttttcggaagaaaaaaaaattaaaattggtcaaaggttggaagtttaaaaactagtcgttggcctgccaatttagccgtttggctttttaaaaaataattatttgggctcaaactttgttttaatcccaaactttttataattacatttttccctattctcaactataaataccccatcattctttcatttttactcacaaaatcatcaatctctctctaattttcttctataattcggtaaactcgttccaactcttaagttttaatattatagttttgtttgttttagtttgtataattataattaatatggcgttttctttgaaaaaaatatttggtggtaaggaaaaatctaaaattggtgaatcaagtggccaagctactactcctccccggctccccgacccagacttgttacccgtcctcctccacctgttattcttgatagtgataacccttgttttcaatttaccgatagtcaattttaccatgatattgcaccaggtcaacaattaaatgatgaatatatgaatgttctttatggtaatccaactatcgatgaaaataatgaggaaaatgatgatttagatgaaacgcaaccggatttagatgatacacctactagtcttgttgttaaccaaactgataataatccaaatgatgccccgtctgaccctcatgtagtaacccctacttttaatagacaaccttctagacggtgcgaaacatctcttgtttgacacttttttattcaactaagagatcaaaataaggctaagtgtaaaacttgtgagattttgatggctcataaatttactggagaccgtagcggtacgggtagtttgactagacacataaagacacaccctaaagacaaagctagatttcttcaaatgaaagttgcgcaagaggggacaagtgtaggtacttaggttaaccctaataccgggtcaaatctagttcaaccaggaattaacactgttaccggtggcattttatattacgatccaaataaagatcgtgaagaattggcaaaaatagttactgttatgtgcttaccctatagttttccctctaaccctcactttgtgcattatattagaagagtttttaatcctacttataaaggatggcctcgcacaaccgtaaagagcgatatttataaatataaacatgaatatgaacaatatttgcgctatttatttactcatataaattatcgcgtcgctattactactgatattggtagaagtggtaataattgtgattatcttactattaccactcattggattgatgtgattactactcattagttttttttccttttaatggtggtattagcaccttgttgtgctcattccattggggggaggaagactaagaaagatattgccatttttttaatgtcgtaataataaaaattataagccatttccttgaatatttctttacaatttttttaatgtttaaacttgaattacaagatttaagtcacaattatataatataatttacaataaattgtcttagataatataatataattacataaaaaaaaattaaattggccaacggttggaagtttaaaaaccagtcgttgaccttccaatttagccgtttggcttttaaaaaaatagcaatttggccctcaaactttgtttaacccaaaactttttataattatactttttatctattctcaactataaataccccctcattctttcatttttactcacaaaatcatcaatctttctcaatctcaaactcaaattaaagtcttcaagtctttactcatctctcatttctcaaactcaaattctcaattcaagttaaatcatgcccggtgattctagagttagccatttgttcgggaacactataatatggtagaagaaaatgaagaattttacatagtaaagtgcaagagctgtggtcgagtctacacttggcgtccaaagttggaaggcacaggctctttagggaggcatataataaagagttgtcttgcgcgttctccagacattcgtatttaagattttaagtttatttcaaacaatttgtgttattttaaaattatcagacgtattatgcttaatgttgtagtttgttagattaatttgaagtattattaatttattatgcaatgataagtgcaagtttgaatatctctttataatttttttgtgtttaaatttgaattacaagatttaagtcacaattatataatataatttacaagaaatttccttagaaaaacaattttttttaaaaatagcccggaacacttaggcccatttaggcccgtgggcccaggcccatttagcccgggcccatatgggcttaggcccacagtggccgggtccaccctccaggactgctaagcccgaaaccgttaggcccgggaccgcttgagcccagcccgcctgagcccgggactgtttggcccatttaagtccgggctcggcccagataacatccttacttctctctcaagttcgatgcagagacatgttatcatttgcaagtttgtgaaaatgatttatttatttttggtaggaagggtttgtgaaaatgatgatgaacgtcacatagaacttagaagcgcaaaagcattaactaaaattcataatttctttctttgttcttctcatatgtccttattattgttcttctatcatttgtttaatttttgtaaacttgtcaacgaaccaaccaagaaattgtaggatgatttggttgttaatctctgaaattgtactcttattttctttaaatttgtaattctttcaattttagtagaaatggaactttttgttggaaaaataatttggagtacttaacttagagttacaagtatagaaattaaggacaggtagtccttaacttagggttacaagcacataaattaaagatagatagtcctgaacttagagttacaaattcaaaagtgaaggacatgtagtcctgaacttagagttacaaactcaaaaactaaggacatgtagtccttaacttagacttacaagctcataaattaaggacaactagtcctcaacttacaataacaagctcataagttaaggaaacttggtcctgaacttagagttggaattcaaaaattaaggatacttggtccttaacttagagttacaagcacataaattaaggacaggtagtccttaacttagagttacaagcacataaattaaggataggtagtcctgaacttcgagttccaagttcaaaagttaaggacatgtagtcctgaatttagagttacaagttcaaaagttaaggacaagtagtcctaaaattagacttacaagctcataaattaaggacagttagtcctgaacttacagtaacaagctaataaattaaggacactttatgagcaataagggtattttcgtccgaacgggtaaagtttattaaagcagtggctaaagactaaagatattttaaacagtggcttaaaagtaaatacatgtctaattagtgactaactttgcatttcccccacattttgcaaggattgactttttgggtttagctgtgcactgaatagcacttcaataggtcaaaatggcatggtgtagccatttttaccgttggcgatagccatgtcgctaatgtaatcgatctctgaccattttaacttaaaatatattagtaaatgatatatttgtccgtgtcctttttaacatcctgtttagttacttttcgtcttttattcgctttttgctttctttttagagcagtgtacgagtttcgctttcatgagagcacttgtttcgaatttggtctaggtacttattgttgtttcgtttgttttaattttgatttccgtattgttaacatttaaatatttgtggtattttaacatctacgattatttttcctctgttcagtagttcgtcttatttctggtaatcttgtcgctctgttattaattttatgttgtaatgttgtaatcgttgcgtaacttgttttgataagttgttcaaatatttttgtaatcgttgtacatcagggttaattttgaagtagttttttgcctcaacaacattatagattgctcgagttcttgttaaaacttgaaatccagaacaatgtgctggacttcatacttaaaaatttgattattttgtaataaattttgttccagtaaattattttgtaagtctgacctctaaagtcttgttgtctagtattatatgctggatgtgttttataatatactggaatttttacatgttgtatttgattatgtttttaattgacttctgaaggtttgttgtgcaatataaattaatttatatttttttattaagtatgttgtatttgattatgtttttctgtattttttttatggataattattgttactaataaatttggttccagtatattatacgggaagcgtgacctctgaaggctagttgttcagatttttatactgggggagtattatattatattggagtttcgtttctatttgattagttgtgtttaatgataatttgtatacgtgttttttatatggattttgattatgttttttaattgtagcccaatatttgtttatgcatttttatttttgtaataaatttggtccccgtatatatattggaagtctttttgaaggcttgtttctgtcacgacccggaattctcactgttgggaccgtgatggcgccaacatttcacttgctaggcaatccaacgttagagaattattaatccaatccttattcaatccagtaaataacaacaatcaaactagaacgaattaaaatgagtgcggaaatatataatagcctcaatatatactactatccggatctggagtcacaattcacgagcttctaagatttactacaagtaaaagtctgaaagaaatacaaatattttttgaaggaaagaaacagtaaagtgcaatgtctagaaggggactccagggtttgcggacgccggcaaatctaccttgggtctcctgtcgagtgaatccagcagctaacctcacgatcaactaagaccggcaccaaaatctgcacaagaaatacagagtgtagtatgagtacaaccgaccacatgtactcgtaagtgtcgagcctaacctcgacgaagtagtgacaaggctaaggcgagtcactcacactacaacatgtacgcagtatacataataaaagtagaaaaagaaatatagaatagaatcaagcagtaaattgcaagaaataactacaactcccaaaaacaagtcaaaatcatttagaaattatcaatccttaagttcaaaaagagaataccataaagctaaaacaattcagggaaacataaacacataggttattgcggcacgcaattcgatcctgttacgatccaaatcgatgggctgcgacgggcacccggtaccttactcaatcgagtaccaacataacgtatcttttcgtatcatactagcatagataattgagccgaagaggctgccgtgaaatatgtagaatacaacatgtaataccaacttatacataagacttatgggcctctaagaccaaaataatcactcgtatactgaacataggctgacaaggccatacaatcttttaggtacatgatatctgtctacaagcctctaaggatacataattgtcataaagttcgggacagagcctcgccataccaaacaatacacatcgaaatcatactgaccaaacaagcaactccggagcaactagagtgcaccaacatcttttgctgagctgattgcctacttggaggacttttgacctgtctatcgagacatgcgggcatgaactgtcacgacccgaattaccctccgagcgggctcgtgacgacacctagtctctacgactaggtaaactttaaacttacggaaaataaaagcaatataataatttaaatagaaaagaagaagaaacatataactcaacctctcggcataaacaacttcactttccaaaactcggaatgtcacgacagtcacaagctctgtactaaatgtagctctatacaatgaaatacttgaaacatccataagttaactaatcatatacaagagtagaaggggactcgtgggattctgcggacgtggcagaattacctcgcgatctcctggtagttgctagtgatattcctagcctcgatactgggtgctggaatctggatcttcacatggaaaacatgcgccggaaagggcatgagtactccataattggtacccagtaagtgccaagactaaccctagtcaagtagtgacgaggtcagattaaggctctactggatgtttatagtaagtcagtttaaaatttaagcaaaagagatatagtaagctaaggcaaaacagtagaaatggtaagctgaaagaaatagtaaaagggagccctcggctcagcacaacatatatcacaatagcaaatatgcaatgcaattgaggggaaaactcccggaatctcgtccgtagtcccaatttaaatatgttatgcagtacagggggaaagctcccggaatctagtccgtagtcccaatttaaatatgttatgcagtacagggggaaagctcccggaatctatccgttgtcccaatttaaatataaaatgcaatgaacaccggatatagtttatttaaacagttcaggaagaaatcacaggcaaatacggataaaactaactaaacatggtacaaatagtaacaagtaggagtaactcaagtaagataggtaggcatgcacattcctaagctacactacacagttagtacaggaaaaagtgaaatatggatgaatgatttacatcatgaaaggaaaaggcgtagttttagtaaatatagcccgtgtacgcactcgtcacctcacgtacacggcgcccatataacaaaaacagtatttaggcaagccacttaccttgactgcgctaatcaactcaataccacgctcttgccatgagtatccggctccgaatgacccaaatctaatcaattcgattgcataatgtaaatatcactttaaggaatcaaaatagttactaagttcgaagctaacacgcgaaattaggaaattttcccaaaaagtccccggggcccacatctcggaaacgtataaaattacaaattccgaacacccattcactcacgaactcactcgaacaagaattgtcaaaatccgacgtctaaatctccctaaatcctcagatttctacttggggaagttcatcccaaatttcatgggttttcatccaatttcattgattatattgaagaaattgatagagattaatgttatacaagtgaattaaggttaggaaatgttacttatgaatctcctcttcgaaacccactgaaaatcaccaacccgagctctaaatcatttttggagttatgaatttcaaacccttggatttttgtataaacaacccagggattccgcacctgcgactcttggaccacacttgcggtgccgcacctacggaaaatccatcgcatgtgcggaaagtcacttaacagggctggggccgtacctgcggtcacttggccgcatatgcggtcttgcacctgcggaacccagatcgcacctgcgaccactggcatcccccacccaaaatccgcatctgcgagcctatcctccgcacctgcgcttccccgtccgcaggtgcgaaacactagaaccaataatggttctgctgtttctctaagttccaaaatcacccgttgagcatccgaaacattcccgagacccccggggacctcaaccaaacttaccaaccagtcctaatacttcattcaaacttagttgagcctttaaaacacatatcataacatcaaaatcatcaattatgtgtagattcaaacctaataatttatgaaatttccaaaatccacattcgatgccaaaacacgtcaaaacgcctctgaatgacctcaaattttacacagaggtcataaatgacactacggacctgctgtcacttccggaattccatttcgagcccgatatcaaaatttcacctatcggccgaaatcatcaaaattctaacttttgccaattcaagcctaaatctacctcagacctcaaaaacacattctgaacacgctcctaaccccgaaatcacccaacagagctaatgaagtcgacaaaattccattatggatccgttttctcacagttctaactatggaccgatttctaaagttaattcatatttatggactatgtgtccaaaatccctccgaatctcaacactcaacgttatgacaagtcccaaaagcagaaagagacatgggagaaacagttattaatggttcggggcgtaaactctcaaaacgaccgaccgggtcgttacattctccctctcttaagaaaattgtgaaagatgagggtactgactccgcatatcctgctcggtctcccaagtcgcctcctcgatcgaatgacccctccactgaaccttggctgaggcaatattcttcgacctgagcttcctgacctgcctatccaatatagctacaggctcctcagcaaatgatagatccttgtccaactggactgaactgaaatctaaaacatgagtcgggccaccgtgatacttccggagcatggagacgtggaataccagatgaacacctgctaggctgggaggcaaggccaactcgtaagccacccccaacgcgctgcaatacctcaaaagtgccaataaacctcgactcagtttacccttcttcccgaacctcatgacgcccttcataggcgatacccgaagcaaaacccgatcaccaaccataaatgccaagtcacgaaccttctgatccgcacaactcttctgcctagactgagctgtgcgaagtctctcctgaatcaccttcaccttgtccagggcatcatggaccaaatctgtacccaacaatcgggcctcgctcggctcaaacaccccaccggagagaaataattattaagggttcggggcgtaaactctcaaaacgaccgactgggtcgttacatgaatgcagcatccctaggcaaaatggacgtcagtacgaataatgtaccgattatgtaaggtgcataaataagtacgtaaaagacatggaagaaatattgaataaatgactcaacctgtaagtcaagataactctgtaaatcatgaaatacttttactgtcatgcatatacgtatgatgtcatgtcgtgcataggtacatgtgttcataacatcatcaagcctatgagggcgtcccattatatcatctcgggcactgtgggaaaaattatcaacgtataccatttgatcaggtggtggtgcgtatataacaccataacctttcccatatccccaatcatcaacgtataccggctgatcagatgtggtgcatatataacgccatatatatatgtcacgtgaaaatatatgttaataaaatctctcggttcgtcataagaccattatgcctctgattaatatcataaaataaactttaccaacttatatatttttgagacccataaacagatgatagaataatatgacacatggggaatcaaaaacatcagcatttctagtatttctatgaatagagcatttatggaagttgtgcattttatcgttacgttcatgtcgtatagatcatgtcaaaaagaaataagggatagccttaacatacctggggcagggaaaagtccgtatgatattcttggaaaaggttgcaccgtactctcttaagaatcgcaaaatctcacgttgctaattgtactaagaaacctcgttggatttttttgttgaggaaatcacgttatcaatgtagtaatttgattgaagtgctttgagaataaaatttattgaaagcctataagaatggctaacgttctccccccccccccccccccccacttctaattgtagtctttgatatgtaaaatattgaatgaaatgaatgtgtaactaacattagttgccacctaattaaaattgatcaagagtcattactttaggatgtggcttgctgacacgtggggatggaggtgggaaagtttaatctttatccacatattaagtaattaggtaatgtcccgttacccaataattaattaattatccccataactaagaattatttccacttacttaaaatactaacttttcacataccttatacaccttactatcatggccatatggtaccttgtatgacaatagttcataaatgtcgggtattctagctcgcagagtattttattccaaaatgtcaaacttcgacgaaatttattttcttcgatttgcttatcctctcaccttcacgaatttacttatcacttgtttgaaatagcataatccttataatatccaaatattcttttccttggactgatgttaattgacaaattcaacgtgcaatactacatggtccaacatcgtcgtaatttaatactgcgaggcgtaacatcattgtaatattatactatggggtatagcagatctcaacgcacatatcatattcctcccttatttcctcataatagtataaacaacaatgaatatatataaatgtgttgcggcacgcaacccgatcccaccatatcacaataacacagtcatggttcaaccttattccaccaaacaatccacccttattacacatgttacggcgtgcaacccgttcccatcgtacaatatcgattcacccttattccacctcaatatatcatccttatttcacctgttgcggcgtgtaacctgatctcaccatatcattatcaagtactcagtacgcacagaaaaatcacaattcaaatcacagaatcccttcaaaattcataaacaccaacccgaaacaagtaggatcttgtacaccatgaaagttcacataatagtactacacaacaagaccaatttagaatttacaactaaaaggtacggataatgtagcttaagcaaatagtaggagattatgaaactatggaaagaactaacatcatgaataggaggaaacaatgtctacaagtagaaattaggcatggaaacacaattagagcaggtaatagttaagacagggaaagagataatatgagaaaagcggaaaacaggggaaacagataatttggcggcgcataagtactgtcacctcacatatacgccgctcgcatgaaattcacatagaaaatagacacaacacttacctcgctccaaaggccacttaatgctcaatcacaacttttcgtctagaatccacctccaaaccactcgtatctatccacaaacgactcaataatatcaattattgctaaaggaatcgattacaatgcataaatttagatttcccaaacttccccccaaatgtaaaaaatcgaccccaagcccgcttggtcaaaacccgaggttcataccaaaatcaatttacccattcaccccgagcctgattacgtaatttattttgaaatctgacctcaattcgaggtctaaattccaattatacaaaaatccctaattctacccaatctcccaatttccacctaggttgaaaactcatgagatgtaatgggtaattgaaataaagtaggttagaatcacttaccaataaattagggaagaaaaccttttaggaaaattgcctataggtcttctagttttgaaatttcgaaggaatggcaaaatcccgttttggttctattttgaataactgggcgtcaggtattcattgcattcacgtgaatcctgacgcgtttgcgaagagcaatgcatgttaggcttacgcgattgtgagaggctacacacgttcgctaaggtttagcccccctgacctccgagtttgcgagacaagacccgcgtttcgtagtgtaatctcaagtctccttcccagcctagctaacgctatgcgttcgcgtgtgacgagacgtgtttgcctagagcgaacccccaatgctccgcgttcacaatcatggtctcgcgttcgcgtcgtgtaaatcctcccctaacccagatccccttcgcgatcgcgaagcagaacacaccaaaaaactagttgcagcaaaaacaccagatttttctaagtccaattcaccccgtagcctatctgaaactcacctgagccctctgggctccaaaccaaacatgcacacaagtactaaaatatcatacgaactcgctcgcacgatcaaaacaccaaaataatgcctagaactacgaatcatacaccaaatcaaatgaaaattgcaagaaaactttaaaacttctattttcacaaccgaatgttcgaatcacgtcaaatcaactccgtgcctcaccaaattcgacagacacatcataaatatcatagtggacatgtaccgggctcggaaactaaagtacgaacccgatattaataaatccaaaaataagccgatccttaaaaatcataaaactttcaaactttcaatttttaacaaaaatcaatagctcgagatagggacctctgaattcgattctgggcatacacctaggtcaaaaattacgatatggatccacccggactaccaaaacacgaatccgggtctgttttctcaaaacgttgaccggagtcaacttagatgaattttaaggcaaaattcttattttatcagtttttaacatataagcctttcgaaagaacacttggactgtgcatgcaaatcgagaaaggctaaaatgaggttttgagacctcaaaacacataattaggttctaaaatataagatgacctatcgggtcatcacattctccaactttaaaataatcgttcgtcctcgaacggacatagaaaagtacatgggctggtgaaaagatgtggatatctacttcgcatatctgactcggactcccaagtagctacctcgacaggctgacctctccactacacttaaactgtaggataactcttagatgtcgaacctaccgggctaaaatagccaccggctcctcctcgtaagtcaaatccttgtccaactggacagagatgaaatctaatacatgggacggattaccatgatacttccggagcatggacacatggaacaacagatgaactgttgataaccttggtggaaatgcaagcctgtaagacacctcccacactctctccagaatctcgaagggcccgatatacctagggctcaacttggctcttctttctgaacctcattacaccattcatgggtgatacctgtagaaacactctctccctgaccatgaaggcaacatcacgaactctacggtcggcgtaactcttctgcttggactgagctgtgcgaagaagatcctgaataatcttgaccttatccaaggcatcctgtactaagtctgtacccaacaatcgagcctcccccggctcgaaccacctaactagcgatcgacagtgcctaccgtataatgcctcaaagggagccatctgaatgctcgactggtagttgttgttgtaggcgaactctgcaaggggaaaaaactgatcctacaatccttcaaaatctataaaacatgcacgaagcatatcctccaaaatctaaatagtgcgctcggactgtaggtccatctgaggatgaaacgctatgctcaactcaaacccgcgtgcccaactcacgttgtactgcccttcaaaagtataaggagaactacgtaccttgatcataaatgatagacacgggcacaccgtgaagacggaagatcccgcggatataaatatctgccaactgcttcaaagaatatttaactaccaccagaatgaaatgtgctgacttagtcatcctgtccacaatgacccaaacggcatcgaacttcctctgagtccgtgggagtccaacaacgaaattcatagtgataggctcccacttccactcaggaatgtccatcttctaaagcaaaccatccggtctctgatccttatactttacttgctgacaatttagacaccgagctacataagcaactatatcattcttcatcctcctccaccaataatgttgccgcaagtcctgatacatcttggcagcgcccgggtgaatagaataccgagaactgtgggactcctctagaagcaactcacgaagtccatccacattaggcacacaaacacgaccctacatccccaagactccgtcatctccaacagtaacctacttggcaccaccatgtagcattgtgtccctaaggaccaataaaaaagggtcatcatactgccaatctttgatacactccaacaaagaagaccgagcgaagatacaagctagaacacgaatgggatctgaaatatccaacctcacaaattggttggccaaagtctgaacatctgatgctagtggcctctcaccgactggaatgaacgcaagtgtcacgacccaaaccgatgggacgcggcgggcacccggtaccttactcaactgagtaccaacatagcttatctttcttattacaccatcataggcaagtgggccagaaggggcgtcataagataactagagtaaacatgagggaatacccaacatagaacgacccaaccggatatagaaactcttaccggtgacgtacatgcctataagaccaatatgatccattatatacttaaaatataggccgacgaggccatacaagtatccgtacacatgacatctatctacatgcctctaagagtacatacttatcataaaggtcgggaccgggctccgccataccaaacaatacacgtctaaatcatattaagcaaacaagcaactccaaagcaaatggagcgcaccaacatctttcgctgagatgatagcctacttggaggactctccacctgtctatcgggacctgcgggcatgaaacacagtgtccccaggcaaaagggacgtcagtgcaaataatgtaccgagtatgtaaggaataaaaatcagtaaacaataaacatgagagaaacatggagtaaaagactcaacatgtatatctgaataactttgtgaataatttaatattataatgccatgccatgcatatgcgtataaatgtcataccatgcatggatatatgctttcataacatcatcaagcctctgagggcatccccccatatcatttcaaccaccgtgggaaaatcatcaacgtataccagttgatcaggtggtggtgcgtatataacgctgtatccttttcccatatctcatatacatatatatgtatatatatacgtgtatataacgccatctagtcatggatcaatataaatgaatgcaatgcatgaaaattacgtcaataaagtctttcgaagtgtcataagaccattatgcttctgattaatatcatgaaataaactttatcaacttacgtattttttgagacccatgaacaaatgatagaataaatggacacatggggaatcaagaacatgtgcatctctagtattctatgaatagagtcgtttatggaaattgtgcatttgttcgtttcgtttgtgtcgtgtagatcatgccaaaagaaagaaaggatagccttaacatacctgaattgcttctcttgacaatccctccaacatacgttgattgcgacaaaacatgtaacgacggattgaagtagggaaaaattcgtatgatattcttgagaaaggttgcaccgtgatcccttaatatttgaaattcacgttgcacttgtaggggtttacaagaattcacttgagaattccatccgttccagcaagcctaagtatttccttcttaaatgatatatgaccatctcttatctttacaagcatagaaagcaagagaacaaattactaacaaacctccaaactaataaaaagtctaaaaggtcatgaagtagtcatatgacccttgctaacattaccactctccaaattggccaccttgtatgtgactttaagagtccccattccttaatgcaaggctgccttgttgattgttatccattcccaacaattaaccaccaatcatcttaattaagtgttaatctcccactagaattaataattacccggttatatacataattaagaattatctcaaattgcttataatactactcactttaaacacaccttatacatcttgctatcatggtaatgtggtaccttgtatggcactagtccatgaatatggggtattatagcttggaccgtattgtatcccccaaattgtcaaacttcgacgaaactcgttttcttcgattcacttaccctctcaccttcacgaatttactatcactttcttgaaatagcgtaatgcttataatctcaaaacaatctcatccctaacttatgtcgattaacttacgacgaagatttaacatacaaaaatgcggtatgtaacatctcatttccgagcttccatcaatttacttatgacgtactttcacgtacgaaaatatggggtgtatcatcatttccccctttggaacattcttcctcgaatgttgactgatgcacttatcattcttataacacatagctcttgcgttactctagtactcctcttgccatataggcaactgttctgtgaatgaatcccaaagtcaagggcattctccccctcccctaaggcctctttctcacaccctgactcgtggtcagaatccttccaatcttgtaactgtttctaccttttatcatgcagcctgtacgactatgactttgtaagtgcgcctatgcgactcttctctcttttttccacaagattttaaccaatctctaggcctcacttggtaaacgtatacatggcttaataagatgtccccctgggaatctataagtatactgaagttctttgctcggtactttgttgaacttacgaatattactatatcttgtttcatagacccatttatctatccgtatgactttactgtatcttgataggtcatactataccataactcttactacgatttatcgttgctgaggtctgctaccaaactccaggttattgttgttgcctatcctatatgcttcctcattactgttcatcttaagaatgacatccttatcttctctcacacgttggaacattatatatctatcgttgattcaccttaatgttgatcaatattttaccactgataacttgaccttttatataacactgccgccagggctcacgtatcatcggggacatctagagtaattagactgatccacttaggggcgatactatactttcataaccgtatttcatagcatcccaatgtaattcacgtaagtaggtattttaatcctgtataattcttgaaatccctctttttttcttcttcaaatcatttctcgatcgaaggcccaaacgtcatcccttatctatcacaatcacacctcatttccctaccaaggaagcattccattccttctagatgctattagtcttagattcctttgagttcatttaggctatactgctctttctataagttatagaaaccattagctctcttgttttcatgagcttaatcccgaggacttatccacattctcgtcaccttctcactcgccctttctcatccttactcctgtcataaaaccttgtcgttttactatactttagctttccacctatacaaatctatttatactattcacaaccttccttcaacttgcttgcaccatagatttctttatgttattctgtaacatcaagcgagacatcacgtcgtctctaactattctttactctcttggatagatctctctgtacctagaaaccataggctagaagatatgctactgacgacaccgttattgatactgaatcctagcgcttctagccttctatccgaagtatggactattcagaaccttctgcatctgagtaactcgtatgtagttcacttttaccttacttaccttaaaatcttgcatcgtattttctatctctttcatgacctcccttccatacaggtatgactcacatccacaatttgaagctttgttataatacttgcacctctggcgcatacacaatctagtgggagcttcatactgacttcttataaggatgatactcttctaactatctttattgtattatagaatatggctactgtattgtctctcttgtacatatgatattaagagtgattctgcaattttctcaatcacgatgtccataattttctaggtccaataatcaaactcttgatttacttagttgctttagtttcctctttccactaatcaacctttatataggcttaaactatatcccgatctgcgactcatggtgttagttattactatagcatttcatgagcgcaatggaatatccatgatacatatcttctaataattcaatcttttgtctatgccctggacttcattctttcttttaagttataccggagtcttctacatctatatgattgtcaacatatgtgctgcatgtataaaaatccgagctcttaagtgcgttcataacataactaactttgctcattaattgaataattcttttcgttccttctcatcttcttttaaatgtaagcaattacttttcctggtctttctgcccttttttacgttcatacttagcttaccttagtgcccacacatattggaattccctacaactcatatgatcttgaatatcacttctgattttacttcccgttcattagccacggtaggtgccattttcttatggggtgcgtacaatgttgttgtgagactgttgttatacgaccatttcctccttaggttactgagcttaggttgaagccttcttccttactttcccaactagtctttcatagtatttagggaggatcctttgactcttgtaaagctgtgagattattacattgtatactcgacggaccttttgatgtccttccttgcatatattatccgtagttacttatctccacgcccttgtgcttgtagggttctgtttgaacttaaattttgactgtttccagtggcattctcttttattcccgtaatacttatacgacacctttaactaccccaactcatatatgcatatttctcaaggttcacgatgtcatatctgcaagacggaattacccatgttgggttcactatgtttatcttgcacgatctgttgatttgtctgtatcctcctgtctagccataactaggctcttcttgaattaactactatctacttgtttgaccattctcatatcattaatccgtgtaatctttcttgggttatttcctttgtcttaacttacatcttgcgctggctctttatttatcaataacatcccgggccggaacccttactttctctccttggcgtcgtgcttgcctaatgttctggaatcgtagcatatacataggagctgaataagtgtaatcttattccttttttgtttttaccgtattcttcctttaccatcccatgattactagaaccacttaattccgacttcatgccacatcactccatattccccctttaggaaagtactaagatttagagctgggacgatctacctgtagatgttttacctctttatctttgtcatcttttcacatcatcgatgatctttacccgccttgcggtaatccttctgcaccaaggataacgaaaattccttactcacgagggtgacacttagtgtgactggaacatacagtcccttaagcttaactttgttaacattgcttgctttagggaagcgtcttcctgaatgacctttaaggattattcttctatcgtccattatgttattgccgtaacacaatctctgaaattctcatgatgctgactattatcaaatcactcagtccctcattcatgtttagcttatcttgttcaacagtacatactgatttttattactctggggtctaacctttccttccagtaatcacgttagagtcacgaacttatttctcgaaatgaagatatgactttatggcctatactcttttgttgtttcgaggcatgtcacctcttgtcttttccttcacttgactatagactctgtaatactgtcatcttttttatcttccattgtcatcaatgtatcacatcttactcataatgcttcattaactctcttctttttcccgctaacatttatgtttttcactatactctgaaaactcgaacaagacattcatttgcttttagcaccccttgctccatccattgtctcttcgggttgcctaacattctttctctactagggacgggagccatactaaggtaatatttatcccttccagtatttcagtgcccgtctttgtaattgtttttgaacattctagtatgcatatctagctgtactattctagagtgcactatctgggcgtctcacaaggagatctattagcacatttgcaatatccttcggaaatgtcaactgaagcaaacattacatccattattttgggttactctaacccaagcgggatcctgatatctcgtccttttcttaaactacacctgttagcccccatagaacataactgagatgggtgtggctaattgtatacacttctgttacaattgaaggtaactcaaaatgcttatatttatctgcttgaattgtaaagtctattaatcttacttcttttacttgctaaaacttgtgtctaccttccgattctcttattcctttttaccgtaagagtgaatagacattcttgccttagagatccttatcaagaagcttacacattgtacacacatgatctgctgaatacctcatatttatccatcataagcatgatgcaaaaatcaagttcttcatactcaactcttccacaactatatctcttacaaacagtctttctggatgtaggcatcgtcgtatatgaataaggtagagtttgaaaaattgagttcttacaactgagctctaccacacggtctagagtaagaataaagagtaacagtcctaaattccatgtagcctcctgcttataagtgtggtgcacaacaaacccataaacaagactctactagacacgacttgtagactccctagcagagaactgctctgataccacttttgtcacgacccaaaccgacgggcacccggtacctttctcaaccgagtaccaaggtaacttagctttcttattacgtcatcataggtaagtgggccagaaggggcgtcataagataactagagtaaacataagggaatatccgacatagaacgacccaacctgatatagaaactcatacatgtgacgtacaagcctataaggccaatatgatccattatatacttagaatataggccgacgaggccatacaagtatccgtacacatgacatctgtctacatgcctctaagagtacatacttatcataaatgtcggggtcgggccccaccatactaaataatatacgtctaaatcatactaaccaaacaagcaactccggaggaaatggagcgcaccaacatcttctaatgagatgatagcctacttgaaggactctccacccgtctatcgggacctgcgggcatgaaaagcagtgtcccaaggcaaaagggacgtcagcacaaataatgtaccgattatccagcaagcctaagtattcccttcttaaatgatatatgaccgtctcttatatttacaagcatagaaagcaagagaaaaaattactaacaaacttccaaactaataagaagtctaaaaggtcatgaagtagtcatatgacccttgctaacgttaccactctccaaatttgccaccttgtatgtgactttaagagtcaccattcttaatgcaaggctgcgacgttgattgttatccattcccaataattaaccaccaatcatcttaattaagtgttaatctcccactaaaattaataattacccgattatccacataattaagaattatctcaaattgcttataatactactcacttttagcacacgttatacatcttactatcacggtcatgtggtatcttgtatggcactagtccatgaatacggggtattatagcttggaccgtattgtatccccaagttgtcaaacttcgacgaaactcattttcttcgattcacttaccctctcaccttcacgaatttacttatcacttgttcttaatagcgtaatgcttataatctcaaaacaatctcatccctaacttatgtcgattaacttacgacgaatttttaacatacaaaaatgcgggatgtaacatctcatttccgagaccatcaatttacttatggcatactttcacgtacgaaaatatggggtataacatcaaggatgcccatacttgctgcctttctactcaatgcgtcagccttcacattggccttacggggataatacgagatggtgatatcatagtctttcaatagctccaaccacctcctctgcctcaaattgagatccttttgtttgaacaaatactgaaggctctgatgatccgtgaagaccccacacgacatgctgtaaagatagtgcctctaaatcttcatcgcatgaaccatggatgccaactctaaatcgtggatagggtaattcttctcatgaaccttcaactgtcgcgacacatatgcaatcatcctgccctcctacatcaataccacaccgagcccaactcgggacgcatcacgatataccgtagaagatcctgaacttgtgcttaacaccaacaccggagctgtagtcaaatccgtctcgagcttctgaaaactcgcctcacactcgtctgaccatctgaacggggcacccttctgggtcagcctggttaacgaggctgctatagatgaaaacccctctacaaatcgacggtaatagcccgccaaaccttagaaactcctgatctccgtggctgaagtgggcctaggtcagttctggcctgcctcaatcttcttaggatctacctgaatgctctctactgatacaacgtgccccaagaaagtgattgaatccaaccaaaattcacactttgaaaatttagcatataactaactgtctctgagagtaggagtgttcgtcgatcagtatggtacggtatttagacattccggttcggtatttttggtattcgatttcgtaaaatgctataccaataccgcacctaactaaattcggtatggttcaatttttctcctttcggtttcggtttattcagtccggtaatttcaatttattcgttttgaatactaactagtgcatatagtcatagacggtaatattcttaattaacatattcaaaaatacaaaactaaaaacgtttgttgacaaaagttttgtccaatataccaacctagagagagaaaacttagagaaatatcttggtacttgcttagagttaatatatgaacttagagagaaaacttagagaaatgtcttgttacttgcttagaggtaattgattaacttagagaatacaggaaagcaaaattttagatttcttatacttatgttataataaaaacaatgtgtatcgtgtaatataatatatatttcggtatttcattttaaaataccaaataccatacctaataccaattttttaaacttaaaccaaataccataccgaataccaaaatatcgaatgccgaataccgaaattttcggtttcagtacggtaattcgacatttgccaaattatgcatagccttatctcagagtttgaagtacaatccaaagatgttgctcattctcctctcgactgcgggagtagatcaagatatcgtcaataaacacaatcacaaaggagtctaaataagggttgaacacttggttcatcaaatccataaatgttgcttgggtatttgtcaacccaaaggacatcactagaaactcataaggcccgtaccgagtctgaaaagctgtcttaggaacatcgaatgccttaatcctcaactaatggtagccagatctcaaatcattcttcgaaaacatcttggcaccctgaagttgatcaaataaatcatcaatcctcggcaatggatacttgttcttgatggtgactttgttcaactgctaataatatatacacatcctcatcgatccttctttcttcttcacaaacaaaacaggtgaaccctagggcgagacactaggtctagtgaagctcttatcaagtaaatcttgcaactgttccttcaattgtttcaactctggcgggaccatgcggtatgacagaatagagatgggctgagtgctcggagccaagtcaatacagaaatcaatatccctgtcgggtggcatccccgacaggtctgcatgaaacacatctggaaacttactaacaactggcattgaatctatggaaggaacctccgcactagaatcgcagagccttcacataagagataaccctgctggtagacaccccttctcgaccatatgccgagccttcacataaaagataaccctgctggtagaatagccagaagtccctctccactctaatcgaggcaaccccgacaaggctaaggtcaccgtcttgttgtgacaatcaatccaatatagcatgataaggtgacaaccaatccatacccaaaatgacatcaaaatcgaccatatcaagaagtagaagatctacactagtctgaagactcccaatggtgaccacacacgaacgataaacacgatatacaacaatagcatcccccacatgtgtggacacatacacaagagcactcaaagaatcacgaggcacaaccaaatatgaagcaaataggatgacccataggagtaagtagatcccggatcaaattgaactgaagcttctctattgaaaactaaaacaatacctgtaataacaacatcggatgactcaacctcatgcctggatggaaaagcataacattaggactgggacccaccactatgaaccacgtccctaggacgacctctagctggctgacctccacttctaagggccttacctccacctctaattgtctggcccctacctttggcttcctgacccctgcctctggctggctgagcaggcggtgcagcaactagtgccggaacgatggcacgagaaccctgatgttgtggcgggacgcccaataatcttggacaagtcctcctgatatgcctataaccaccacactcgaaacatccatcctggtattgtggctgtggaaactgagatttacccgaacgggtcggatgaccacagtaatacctttgaatggagttgcactgataggagttggtggtgcactgtaggatggctgtccaaaatgaggcacataaggaccacaactccctgaatcactgtgggatgcctgaagcactgaatgaaatggcctaggttgacgacccctaccaaaatcgcccctacctctagatgaggcaccactgaacccaccggaataacgaggtctcttgtcagacccctgacctccctgtggaagaaccatctcgacttgtctggctacattggtagctgcctgaaaagaaatctcattcctagtctccttagccatctgcaatctgataggctgagcaagtccatcaataaacctccacaccccccctctctctcggtaggaagaagaagaagtgcatgacaggccaaatccacagaacgggtttcatattgagtaacagtcatactaccctgctggagatgctcgaactaacaacgattctcctctctcaatgtgataggcagaaacttctataggaagagctgagagaactagtcccaagtaagagcaggcgacccagctggttgttgatacctaatattttctcaatttttttaaaatttgcatatataccttcaaagtcaggttttcataacaattagtatttttctataattttcctacattttattaatttatttttaacttatccagtatttttatctctaataattaattataaaaattgcattacaaataatttcaaaatatttcttgacttaatatattattttttggtcctatttagattaaattatttcagaattggccaaattggcaccatttggccacaattgcaataactttgcaattatagcctaatcatatgttttgtattattattatccaataattagtcatttatatttttaaatactgattaaccatttcaatttactctactaagcatcaatttcattttttacaattattagccatttttataaattatttacatatttttatttgggtatttaatagttatccacttttattttaaatcctagcctaattaaatcctgaccccaacccatttaattagcccaagtaacccagcccaaactcaaagccacctgacctaattcccccttttaatctggaccgttgatcatttctgatcaacggaccagattagtccttaccataattaatccctaaagactaccccccatatcatttccccccatctcatttctcactcagccgtctctaagttctctcatctctctctctgagacgctccatctactgagccctgttctcctttctctggccaccttctcgccggaaaccatggaggtttcacctctcaccagccttatggctccatccttttcacctgtgtcaccgtttgaggatctcaagtgaaccaaaggtggttcaactcacctctccggtctcatgccatctttccgtccatctatggccgttcgagtaagatctatcaccctccggttaaaaggcgacaagattttgagttttcttcttcttttctaggttttctttggaaaccctaaccttaaaatcccccccgatctttctagatttgtaacagatctatgggtattttgaggttttcacatgttttcttcaaaaaactcctgttttaagaatgatttcttcatcttaaaaattagagtttcttaacccctttaaaaacgctttctcctttgattttttattactaatctatgattcttagtatgtttttaaacgtttgtttaagtcttctcctttacccaagttattctgttaaaaccccccaatttttagggttctgagttcgtcttgggtgctatgtttaattaatctgtatgtttctcatgagcattctatgatgctgggagtttactttatgtttgcttgttagggtttttgggttcgattatttttttcctatatctcgtttatgctgtgatacagactgtgctctatatgaaaccctaactcctatgtggcactagtcttcttatggttctgattcgtgtctattacatgcttattctcatagtgttgtgataattcaatgctatctttgctatttgtgaatccctgaatttctatgattaaatacttcattgatcttgcatgatattctccattgattctctaatactttccctaattatgatggtgatttcctgtctctccttgcttgtagcataattatcctgttcatatgtgatattctcctttgattggtactgacttcctataattaggacctcaatcgagggtttcctaattgatttccggagtttaaattattgcttgccttatttctatgattgactttgctgtcaaattagtatacatattttccttaattataattctgaatctggctttacttacgtatgatatacctataactatacctaggactgctttctttatatgttataaccagctttcaattgatttcctttccttatttttaaacctgctattatatccgtttgaatatgactccctaattaaaggaagtccttttaccaacttgattctaattgattgttttactcccataattacggctgaaactattattttactttattcttctgcctatttcaaaattataaatactctactatctctttagcataagaaacgaacaagtacactgttctgaactctctcacacacacatattctctcttgttattcttgcgggttacttgctattatcagtcaactgcaagccaagactgagtaattatacactctactgctcttcattctgcacttattctctaccctaactagtatgttttcagtttagcttcaatcctaaaaaacaatatgtttctatttatggtgcaattccttttgtttctactatgcttttacttgcggttctgttgtctaccttgcaattagcattcttacttggtatcttaccaatgtgattatcctttccctttagtttcagcatgtttactgccttcttatatgtttcactgtgactctgccttacccctgattcccagcacactacaagcatgcactatatgtcacttagtcactctgtaatcctggatacatgctacactcatgaaaccttccgctgaacctatatgtaactctgtttgttatatgctatccctttctttagcaccccctcaatctgattctgttaagttcctggcatgaatccctttgtgacaaactatttctgtgattgtttaggttctatacaaatctgtgatactttagtacttctctgatgttaacttgtatacaaatctgtttatatatatgacatatttgtccccaatccctgcttccctgtttgtgtttgtttccctatactctgtgtattgtttggttattctgattactctcttccctttccctttcaaagctagctactctcttacttttatgcaaacctatttcaaataaactatttttcaactcaactctttcaaaactatgtcaagcacactcacatatactcctagaagtctaggtagatcccattaatgtgtgactgctttgggatccctatgagatcccactgaactctgacacattagagctggcccttccacactgcacttactcaatatggttatgaaaatccgggtgtgagcactgcccgggatcccttgagatccttagggaactctaacacacctggatttgtatgaaaggatgtgagcaataatggcattgagaaactctggagattttggacctatcagtaggctccatatagtataacttcttcttttcttatttcaattatgtaatttatgccaaatggtctgtaataattattgtaaacaactcttggggtggatagtgaaaaagggaaggggtgatcatgcatgctttagctattagaagggtagaaaacatgctactaggttttattccctatttgcgcagtagaaaccatgtttaggcccattttttcaattcatgcattagaaatcatgcttcttaggtctcatgtctattgtttcagcatgtgtgtttttactgtcattgtcacttagaaaatcctgtgctaaaatgtgctaataaccaacactatgccatcatgttatccgttgccatgtacacttagaaatcttgcttagggtaatacatcactaataaacaggtcatcttcacatcttctacatattctgaaagcatgttcaaatgatgtaacatttatgcatttagaaaaatcctgcttaggttctgcatatacatcatctctgtgcattagataccatgtttaggtttacattcatactcgtttaaatacacctagttttactactgatgcacgaaaaggaatagaaacaacttcactcaattcttgcaatcaactggtgataatttctgaactctgaacacttagacaacatgtttagtatttctctaaagtaatctggtaattggtatatcatctcacacttaggcaagccttaggtgattaaatggcttaaaattgggaatctatttctttttgtgtactgcttaatgctcaacaaaattttaaaatcagtaggcaaacggattaggccttcctgggttacaaaacaaatatgcttctctgatacattctgaatttacctagatatcatgctttaggactctgaaattaaatgctgcccttaactgtgtttgagtcgtgttgactatttgcattacttgtggaggtatacttgagccttctatctgtttttctgtgatcccatttaaatgcagtcctatatgttttgtctgtcgtcctagcattttttttcctttaaacctgagggtctgcctagaacatcccttataggtagaagtcctaaactcctccaggactattaggaagggatgggtaacaacacgcaatagcggtcattgaccaacactcgttttaaatacctttatggggtgggaagggtagatatggacatgatgaccggtgcgctaataccacgtgtaacccctctttgaggagtgacataccgggtattgcattgatgtgatccatattacaaacaacctaggacatcccctaccccatatgcatgtttagattataacttcttcaaaaaccttacatagttatcaaatattttcaaaactttagtaacacatgtgtgcttagactgcgattctttcaaaacccttttgcttgacttagacattaattgcttatttactacttgcttaaaattcacaaagttgtttggccgggaaccacaattgtggattctgaggggtgcctaataccttccccttaaaataatttcaatcccttaccctgtctctggttatcaaatcaatgtctataaatgaccccaaataggtgccctaacgcaccttaaatcgttaggtgacgactcttcgaatcctgcttacccctttcccaaaaggaaacgagttatcccaataatgtcaagaaccctgaccgatccgagaggagttggaaaaaaggggggcgcgacactggtctggtcaccaaataatctctccaccatttcttggcggaatcagtcatctgaaatgcagaaaaatcgaccccattggtgtgatgacccaaaaaggggtcatcttatgtgcatctaattttgactatgttccgaggctcgaaagcctccattaatctcacctcgatgtgcgtgcgcagcccgggcgcgtagccgggaagcctttatgtgaaacttgattaagagttaaatttttgataattaattgaataaagttgtctttgatcaacatttttggtaaacgaacctagatccgtgatccgacggtctcagaaggtccgtaggaaaatatgggacttgggcgaaatcgaattccgaggacccaagtgcgagaaatgaatttttaaagaaaattgttttatgaaaatattaaaggcttatgaaaatgaaccttgatgtgaaacctgtgctgccaggcccgtattatgatttcggagcccgaaataggttcaatatgtgttatataagttatctgcaaaatttggtaagaaatagacttgatttgattggtttcggatcaaaatgaggaaaaattggggttaatgaagttttgaggtttttaaagaatttgaaatttggcttgaaaggtgattttatgttctcgaggtccgaatgaaattccgagactgggaatagttcccttgtgtcatttataacttgtctgcaaaatttgaagtcattccgaatagtttaggccgattcggcgcattgaagtgaattctagaatttcaagttcttaagttttgaatcaatttggttttggggtgaattttgagtttcgttgttgttttccatgtttcggaagttcgagcgagtccgtatcatgaatacagacttgttggtatatttggatgggggctcgggtgggcccaggtgcctcccggacaccgcacaaggccaaaaaccagctaaaacaactgctggtgcagctgttgctggtgtgaccgcaggtgcggttgcccagccgcaggtgcgagactgctcctgcggtcccagcctcgcaggtgcggaacaaattccgcaagggcgggtcagctggtgcaaaaacccctctgcagccgcgacctcagcccccttgcctaaagtccgcaggtgcgagctccaggccgcaagagcgggaccgctggcgcggactccttctacgcaggcgcgatgccagggtccgaggcctttttccgcaggggcggtgattttcttgcaggtgcgggaccgcacctgcggtcccaaggtcgcaggtgcggaaatcactgttgccagcccctttttcttaaatgtccaaattacggggttttctccatttttctcaccatcaacttccattagagagcatccaagcttgggcaacatctcccacgaccacccactgtaagaggtaagttaaaccccataatcttctagctttaacattaattcctagttaaattcactactaaatcatctaaaagccatagaattaggtagtaatcttagggttcttgaggattttttaattttccattttaggccatgaagtcaagtagaaatcacaccttagtgatccttaggctatgggtgagtgatctcttcgagaattttcggtatttgatcatgagggaccggggttggaatttggaaattcttcaagaatggcgactttattgaatagctagggtaatttctcacagtgtgcacgcattgatctaatttcgcaccttttgactagttgcgagtcctcgggtatagagttcggagtttcgggcgcaattgtggtccgaggggtagattcgacacgaggtgagtctcctttctaaccttgtaagagggaattgtccccataggtgatgtatatgctatgtgtaaattgtttgggggctacgtacgcgccaagtgacgagagtccgtacgtagcggctattattgttatgtccgggtagtaagacccacatcatgccttgtatgctttcttgtaatgcctgatatgtttcctttgtaatgcttcatatgatttattgtaacgccatatgtactatgaaattatgttttgcatcgtgttattcttctgaggctttatggaaaagaaattgtgaaatatatgggagcaggccgtacaccacggcggaattgaaaagaaattgtgaaatatatgggagcgggccgtacgccacgcggaattgaaaagaaattgtgaaatatatgggagcgggccgtatgccacggcagaattgaaaagtaattgaaatatatgggatcgggccgtacgccacgacaagtgtagaaggtaccttatgggagcgggtcgtacgccacggcagatctaagaatttgtgattattgtttcgttcagtggtcttacccttgaaagtgctttattgtttagttcagcaattgtttggatttttctacttttggtatatatccttgttgcttatttccctgacatgcctactgtatttcatcatgttctatcatatgttatcactacgggaccttagtgagtatcgagtcgacctctcgtcactacttcttcgagtttaggcgggatactcactggggacatatttatttaatatgtactcatgctgcactttcttttattttttgtacttgactgtacaggtccggagctggcacgtctgactatcaggccgacgctagatattgatagcatggtcatacttcacggtgagcttctttcccggcgacttcctaacagcaccccggagctcttttgttatatttctctgtccatttcattcagacggagactctgtatatattgtagtcattgtatattcaatagttgcccacggcactcatgacaccagttcttggcacacacgcgtagtgtatatttatatttttggggttttgggatgtatatctatgtgtatgttttatttcggctttgtatctactatgactttaccttcactcaaggctagtatcatgttagttgttataaactggtaatctttgacttgtttaattagatgggaagggtatcacttagtgtaagttgtgttggcttgcctaaccccgccgttgggcgccatcgcgacctgaatcgagatttgggtcgtgacaacgtggtattagagcacctggttcacgtaagtctcacgagtcacgggcaggcccattagagtcttgcggatcggtacgaagacatctgtacttatctttatggggtgttaggaaacttccctttattcatatcctgtcgtgcaatctatgatgtactcaaacttattcttctattctctcacaaatggtgaggacgcgtgcatccaatgttcttggtctgggaaaggtcgctgcccaaggtcggggtagaggcaggggtagagcacctgcttgaggcaagggacgaggacgtcccaaagctacgcccgtggcaccaccagaggaccctattatggaggagcaggatgaggtgcctccagtagcacctgcttcagtggatttcatgacggggccaggcttccaggaggtcatgggccgtatgctgagattcatggacactatgtctcaagctggtttatttccagccgaccctgctacttctcaggtgggagggggagtccagactcctaccgctcaggccataggtcaggcagcagcagtacgtcataccccaggcacaccgcccgtgggaggggttcagcccgtagtagcagccccagagcccaggccagttgtagagggtgaccagccgaagatgttggatagatggactttgccctctagtcttcgggttgagcggggagaggatgcttaggattttattgataggtgcagggacagactgcacaacatgaggatttaggaattccatggagtggatttcaccacatttcagttagagggcagagctcgcaggtggtggcagtcatatattctcagcaggccagcagattctcctcctgtcacctgggatcagttcgctcagttatttctagacagatacattccatcttctgagagggtggagctacggggtcagtttgagcgactagagcaggggtctgtcagtgactgattatgaggctagattttctgagttgtctcgccatgcccttatgatattgcctactgatgccgagagggtgcggcggtttgtggcaggcttgcatccaggtattagggcctctatggccagagaggtagagatgggtaccccataccagcttgtagtcgagatagctcgacggattgagggttaccgtatgaggagcagggagcagggtcagccaagttagcaggacaagagggtcagggtcacaggtgacttcaggggtgctccagctaggggtagaggtcaggtcggaggcggccagttcagtaggccctcatattcagcacctccactacctcccacgtgtatttcagcgaggcctcagtttggcgctatgccagagcgttcctatcgtcccccagccacccagggtgcacccagtagttattccagtcatcataggtcctctagttcatattttagtgccttaccagagggttcacaccgccctccagctattcagggttcttcctctttcgggcagcgggctgtagcaccaggaggttgtttcaagtgtgaggagccgggtcatacgtggaggttttatctcaggtatcggggcaaggcaatgcagcagagttatcagcataggagttcagcaccactagtctggccgcctcgaggtggaggacaggtcggcaggggccgtcctagagggggaggccagtcaggaggaggtcagttagttcctgttcactctaggggagttcagtcttcaggagcgtcatccagattttatgccatttcggccagatcagatgcagtggccttagacgccgtaatcacaggtattatctcagtatgtggtaggaaggcttcggtactatttgatccaggatccacgtattcatatgtattcgtactattttctcattttttggatatccctcgtgagtccttgtgttctcctttatatgtgtccactcctgtgggtgattttgtggtggtagaccaagtctaccgttcttgtgtggtcactttctgcggtttcgataccagagcatatcttttattgctggatatgattgattttgaggttatcctaagcatggattgtctatctccttatcatgttgtgttagattgccatgccaagacagtcactttagccatgcctgagtcgcatggactagaatggagaggttcttcagttagtgcctccagtcgggttatttccttcataaaggctcggcacatggtcgagaagggttgtttggcctaccttgcttatgtgcgggacaccgccgagtctcctaccattgattcagtgccagttgttcgagagtttccggatgtgtttccttcgaatcttccaggcatgcctccagatcgagatattaacatatgtattgatttggccctagatactcaccctatttccatcccccctatcgtatggctcctaaggagctgaaggagttgaaagagcagcttgaggaattgttgaccaaagggttcatcaggacgagtgtgtcgccgtggggtgctccaatcttctttgtgaagaagaaggatgggtctatgcggatgtgcattgactatcgccagctaaataaggttaccattaagaataagtatcctctgccgcgcatcgatgatttgtttgatcagttacagggtgctcgtgtgttttctaaggttgactttgagatcgggttatcatcaactgaggattcgggcttcagatgttccgaagactgcatttcgtaccaaatatggccattatgagttcctggtgatgtcctttggtttgactaatgccccatcagcgctcatggacttgatgaatagggtattcaggccgtatattgattccttcgtcatcgtcttcattgatgacatcttgatttattcatggagcctgggtgagcatgagaagcacttgagagttgtgctccataccttgcgggaacagaagttgtatgataagttcttcaagtgtgagttctggttagactctgtggcatttttggggcatgtggtatccggggaaggtatcaaggttgatcctcagaagattgaggcggttcagagttggccgcgtcctacttcagctacaaagatcaggagtttcttgggcctagcaggctattatcgccgattcgtggaggggttcaaagatgctcatgcacaagcactaatagcggaagaaggaattgaggatgaccttctttagactgcaaaaactgaagtaatgaggagtgttggattttgcatctgttactgctattgttttctagaataattagttgtttagttttaggaggaatccgctagaagattcagaattttaattatagtaagagtttagtaatttagttgtatgaggagtctactaatttatttatttgtctttttaaagccctatgattaataaaatttcagagacagtttttcaatcctatttgtctatcttcttgctgcttgcatatttttaaaaatccataatactcagtacgcacagaaaaatcacaattcaaatcacaaaatcccttcaaaattcctaaacaccaaccctaatcaaatatgagcttgtacaccataaagttcacataatagtactacacagcgaggccaatttagaatttacaactaaaaggtatagataatccaacttaaacaaatagtagcagattatgaaactatagaaagacctaacatcatgaacaagagtaaacaatgtctacaagtagcaattagtcatggaaacacaattagagcaggtaacagttaaggcaggtaaagagataatatgagaaaagcgggaaaacagggaaaataaataatttggcggcacataagtgctcgtcacctcacatatacgccgcttacatgaaattcacatagaaattaatctgagggttcctaattccctcaagtcaaggttaggcacaacacttacctcgctccaaagggtactcaatgctcaatcacaactttttctctagaatccacctccaaaccactcgtatctatccacaaatgactcaataatattaatttattgctaaaggaatcaattacaatgcataaaattagatttctaaaactttcccccaaaaagtcaaaaatcgaccccgggcccgcttggtcaaaacccaaggttcggaccaaaatcaatttacccattcacccccgagcctgattatgtaattttgtttcgaaatatgacctcaattcgaggtctaaattccaattattcaaaaatccctaattttacccaaaccccccaatttctactatgaaaatcctagattttaggttgaaaactcatgaaatttaatgggtaattgaacggaaataggttagaatcacttaccaacaaattggggaagaaaatcttttaggaaaattgcctccaggttttctagctttgaaatattgaaggaatggcaaaaatcccattttggttctgttttgaataactgggcgtcgggtattcatcgcgttcacgtgaatcctgacgcgttcgcgaagagcagtgcctgttagagttacgcggtcgcgagaggctacacgcgttcgcgaaggtttatccccccctgacctccgtgttcgcgagacaagacccgcgttcgtgtagtgtaacctcaagtctcctgcccagcctagctaatgttgcgccccttttttcctctcggattccgggttttgacattattgggacaactcattttccttttgggaaatgggtacaagaagtttaagagtcgccacctaacaaattaaggtgcgttagggaatctactatgattaactcatagaatcagttcgcattaccagagattgggtaagggattgaaattacttcgaggggaaggtgttaggcacccctcgagatccataacagtgggtcccgaccaaacttactttgtaaattgttcaattagcagataagcggtctaagcacacatatgtagaagggataaagacttttgacagataagcagtctaagcacacatatgtaaaagggataagggaagtcctaggttggttatcctataggatcacatccatgcaatgcccgataatcactcctcaatcagaggggctacgcgttgcattagcgcacatgtcatcatatccttttactacccaatacgctccccttaattgttattaagcgagttttgattaacgatgtctaagcgtgctattacccatcccttccttgtggtcccggaggagtttaggacctctagacttgggcaattctagacctcctaaagtgtttaaaaggaaaaaatataggcgacaacaaataacacgtaggactgtcaaataggaagcagataaaaggctcatgtttacctccatatgtatagatgaataagcaacacgtctcaaacacagagtttaagtaaatttagagaaatcctagagtagggtatctaggtgaccatcaaaatacagaatatgcaacattatatttaaaacgaagtgacagaatcctaatcagtttgcctactgattttctaaacctgttaaacttgagcagtttagaaataatcagagcacagtttctcagtttttataaggacattaattacctaaggcttgcctaggcgtggtgttatacacaaccacagttatatgagacgtttaaataatttaaagttatttcatcatatgctgatataggtgatgaaggttataacaggtgattttatacaacttgctactggatgatacctatgtatgaaactgtttttaacctattttatttgagcgccatgaggcaaatgcacatatagtcctaaaacaggatctctaatgcacatggagaaggttatttattaagcagttttaacaacctaatagaaggatttctaagcgatcatgagttatacagaatcaacaatagagtgaagatctaccacatgtttctaggatgcaaagcagtaaacgtgagtgccctaaaacaggatatctaatgcacagatttggcatgatttaatgcaaacaagcataacaatcctaagcatggtatttagtgcatcacacagacctaaaacatgatttctacaacagattagcatatagtaaagcctagaaacatgatttctacccagttttatcccacagaatcatatagctaccctccctttttattattttccccaatatctatttacaagaattattatagactaggattgcataaattacataaatgaaatgtaaattaaactatagggagccagatgaaggcccaaagtaaacctgggaataccaagccttcaatggtagtctcaaatgccaagaacctcatagccaaggaatgtacaagtgtgtcagagttacctaaggacctcaaggatcccgggcagttctcacaccaagactttctcacattgggactggttatgtggagtgtggaagggccagccccggcgtgctagagttcaaaggaatctcaggggattccaaggaagtaaactgatacgctcaaattacactttaaaatagtgtaaagtggtcgaaatcaaatataataacccaacgaggttggggtcgaatcccacagggaataggtgtgaaaatgttactttgatagtgtgattcttaactcaaatcgtaattctattccattaacagatggggagatgggggttggttgtgtagtaaactaatagaagtagtagcactgagatttacttaaaagtatagttaatatgattaggtgaaccaaggttgtgtccccttttaatgacgtgtaatgcaaatgggtattaatatgatatatttctaatgggacgttcttgatatgcaattgatttctagatagagtagtatttcctctttataatttttccaaatataaaagagttgcaatgaaatccaaatcactgtatgccaaatagaaccatcttacccctaagtgattttattaaacaaggtttaaagccttgagtctttgttatttactcataccaattctaacccacttttccaagttaagaaagaattatggtataagttaatgtttgcaaccactaacaagaaatgtataatgaagagtaaataaatatcaacaacccattatgcatatattcaatgttaaatacccaaatacataatacccatttagggtccacaaccttagtatttaaggctagctactcataataaatgacaaaaagctaagagtattaatatcatgaatgcttacaaaccaagaatgaagtgttataatgcttccaaaaagagagaatattctaataggggaatgttcttcaaaaactggacaagaatgacccacaaaacccaagtaaatccttttatagtgggccaaaggtcgggtgggtcacagacaaaaatacccctgcggacaggttatgcgatcgcattcctgtcgcatatcaggaatgcggatcgcatccttcttgttctcatcgcataactaaaccctagtttcctggtcgtcaccgcattgttgatttgcggttcgcattgttgatgtgcgaccgcagattcacatcgcattcttggtgcagcttcaggtatcggagattctgcgattaagtatgcggttcgcatgtgagttatgcgatcgcatactcgaccgcattttagcccttgagattggcccatcttgtctgttgcggtctgcgatccctgggtgaaaaatgcgtttcgcatttgagttatgcgacgctctcttgtcagatatgcgatcgcatagtgttgctcccctcactttttagcttctttgctttcttttcatggtcttgagtatttacatctcatgcactgcaaaacgtcaaaattctataagtataaagggcaaatgctcttgaaacaaactacaatttaagtaatttggtattaaatgtgccgaaattctccggcacatcatacacacactagagaggaaaaacctaatgatctaagagtaaagagagagtgcttgacatagttttgaaagatttagtgaaaaacagtgtgaagataactttgaggagtggaaaagatttttgaaatagaaactagtttagtagtgaaaaacagtttgagaagagtactaaagcacttttgaaatcagcaaacaattaattggtcatagaacacccagattcagaatcactcaacaaacagatttcacacaaggaggaaggggttggggacacatagaattcacaataagggaacacatgacagggtgcagggaagcatataaatagcaaatgcatagaatacttaggagctttatagaattaacaggttagtcaggatggtaggtaattgagacatagagcaaggatgcaaaaaagccatattgaaagaaaggaagcactggacagactcggacacacaactagagtcagtcgaatgccttaagagattaggtaactaacatgatctcatcagtaaattgtcacgaccctaaatcccacctacaggtcgtgatggcgtctaacgttgcacctgctagacaagcacacattttgaataaacaaacccattaacagctaaaatgaacaagataattacgacaattgtgactaacaatatgaaagttaactgatttcaaaactaatatagcagcaagcttcaaaataaatcccataaatacaacccagaactgctgtcacatactcacgaactgtctatgaggttactaaatacaatgatctgaaaataagtacatatgactgtctttgaaactatagaataagacagaactgaaagagaagggtagaaggtgacgccaaggcccatgaacgtctgtgggtctaccttgatgtctcctgaatggactgatggaatgcccctccgtcagtgcccaccgggcccgattgcgtaatctacacaacataaagaactgcagctgcagcatcagtacatgtactgagtaagtgccgagcctaacctcggcgaagtagtgacgaggctaggacaagcaacaatatatacctttacaattccacataataacaggaaaaatatcgacgaaaataaacaagtaaatacatatatggggagaacatgccggggataaaagagacaacaaatactagcacagtagaacagggaaacaactgaaatgtaaaggtaaaagcaggaatgtaacgtctcagaatagataatgaaaaacaaaaggcacggcatgtcccctcgtgcataatctcacaatcactcggcacggaatgtcccctcgtgcatatatatagaaaaatcactcggcacagaatgtgccctcgtgcaataaataatacacaatcggcacggaatgtcccctcgtgcaataaataataaacaatcggcatggaaagtcccctcaagcgataaataataaacactcagcacgacatgtcccctcgtgcaataaaaaatacacaatcggcacggaatgtcccctcgtgcaataaataataaacaatcggcacgaaatgtcccctcgtgcgtaaataataaacacccggcacgacatgtcccatcgtgcaataaacaatacacaatcggcacagaatgtcccctcgtgcaataaaaaataaacaatcggcacggcatgtccccttgtgcgataaataatataaaaacaacaatataatgtgaaaactaacaatgagaaatctcaagtgtacagaaatactcaataaaattctatcatcccggcaagggactcagctataaccaaaactcgctcagaagtgtaatttcaacagtaagagcctcagctgaacaattagtcaataattccccacgtcatgaaacaacatcaatgaatcgcttctaaatcaccagttattcacagtacagagaatatcaagaacacagtataattcatcacaattgactcacgggcatgcttgaccgcaacatataggtactcgtcacctcacctatacgttggacatgaattacacatagcaaataagactccatacctattccctcaagctgaggttaggccagacacttacctcggctccaaaatgcaagtcaagcctcaatcacagcctttcctctcgaacccaactccgaatcgataatatctagacataattgacttaataacatcaataattattcaatagctcaatcccaaagcctaattatactttttctatcattcttccaaaaataccaaaatccgaccccgggcccgcgcgctcgaatcccgaaaattctcgaagggatcattcacccatagcctaaggatcattaataagaagtttccacttgaattcatagcattaacggacaatacgcaaattttctcaagaaccctaaatttactacccaattcttgattttccaatattttattagtaaaccctattaataattcatgcatgaaactagtattaggaaggaattaacttaccttaacaaaagctaggtcgtggtgtgttcttcccaagctcacaagtctctaatggagtttttggtatgaaaggaatgaagaaatcccgagtttttgcatttaaatatagtctggcctacaggggttctgcactgcggctcgaggaccgcacatgtgagctggggctggcacctgcgaaactgggcaagaggggctggggtcgcacatgcggagggattaccgcacctgcggacctttgtccgcacctgcaagaaagggggactcacttggggtcgtacatgcgatgcttgggaccgcagaagcggtctcgcacctgcaactgggaaactgcacctgcggtcacaccagaaacaggtgcaccagcagctattttagctagtttttagcccagtttggtgttcgggagtcacctgggcccacccgagcccccgtccaaatgtaccaacatgtcctaaatcataatacggaatcgctcgagccttcggaacacccaaaacaacgctaaatctcaaaatcacaccccaaaacccctaaaaccataacttaagaaacttcaagttcttgatttctatatcgatgcgccggaccgacccatacaactcgtaatgacatcaaattttgcagacaactcatgataaccataaaaacctgttccgggctctggaaccaaaatacgggcccggtaacgcagttttcacatcaaagttcattttcaaaaacctttattattttcagaaaataattttctttaaaaattcatttctcagacttgggacctcagaattcgattccgggtacacgcccacgtcccatattttcctacggaccctccaggagcgtcaaatcatgggtccgggtccgtgtaccaagaatgttgaccaacgtcaattttattcaattaattatcataaattcaacttttcatcaaatttccacataaaggcttcccggctacgcgctcgggctgcgcacgcacatcgaggagagattaacaaaggctcacggggcctcggaacacagttttagtcaaatttacacatgatgacttttgggtcatcacaatctccacctctaaaacaaacgttcgtccgcgaacggacatagaaaggtacctaaatcggggaaaatgtgaggatatcggctctgcatatcggactcagactccaaagtagctgcctcaataggctgacctctccactgaactcgaaccgaaggataactattctatctcaaccgtcgcacctgccggtctaatatggctaccagctcctcctcgtacgataaatccttgtccaactggacaccgctgaagtcaagtacatgagatggatccacaatatacctccggagcatagacacatgaaataccagatgcacaactgacaaactaggtggcaaggcaagtctgtaggccacctctcccaccttatccaaaatctcaaatggaccaatgtacctagggctcaatttgcccttcttcctgaacctcatcacgcccttcataggcgacactcgaaggactacccggtcttctaccataaatgccaaatctcgaactctgtgatccgcataactcttctgcctggactgagttgaactaagtctatcctgaataatcttcaccttatccaaggcatcttggactaactcagaacccaacaatctagcctctccaggctcaaaccatccgactggagaccgacactgtctaccatacaatgcctcatacggggccatctgaatgctcgacagatagctgttgttgtaggtaaactccgctaaaggcaagaactggtcccatgaaccaccaaaatcaataacacaagctcgcaacatatcctccaaaatcttaatagtacactcggactgtccgtctgtctgaggatgaaatgttgtgctcaaatcaatctgtgtgcccaactctcactgaaatactctccagaaatgggaggtaaactgagtacctctgtctgatataatggataagggcacaccatgcaatcgaacaatctctctcatatatatctttgccaacttctccgctgaatatgaaactgatactggaatgaagtgcgctgacttgtttagcctatccacaacaacccaaaccgcatcaaacatcctctgaatctgtgggagtccaactacaaaatccatggtgatacgctcctacttccactcaggaagctgaatctgctgcatcaaaccatcgggtctctggtgctcgtacttaacctgctgacagttcaagcaccgagctacataagctacaatatccttcttcatcctccgacaccaatagtgctgccgcaagtcctggtacatcttcgcggtgcccggatgaatggaataccgggaactatgggcctcctgaagaatcagctcacgaataccatcaacatcaggtacacaaatatggccctgcatccgctgaactccctcatcatcaaccgtaacctacttggcacctctatgccagactgtatctctaagaacacataaatgacgatcatcacactgccaggcccgaatacggtcatacaatgaagaacgggccacagtatgggccaaaacaccgccaatctcagaaacctccaatctcacgaatcggttggctaaatcctgaacatccaaagcaagaggtcgctctccaactgataaataagcaagactacccatactgactgacttccgactcaaagcatcggccaccacattggccttccctgggtgataaagaatagtaatatcataatccttcagtaactccaaccaccttctctgcctcatgttcaactccttttgcttgaataggtattgcaaactcttgtgatccgtgaacacctcacatggaacaccataaaagtaattcctccaaatcttcaaggcatgaacaatcgctgctaactccaagtcatgaacaaccttcaactgacgagaagcataggttatgaccttgccatcctgcatcaacactgcaccaagtccaactcgtgaagcatcacaatacacggtatacggtcctgaacctatgggcaacactaacaccggtgccgtggtcaaggctgcatgatcttctgaaagctcgcctcacactcatccgaccacctgaacggggcactcttctgggtcaacctggtcatcggggttgcgatagatgaaaatccctccacaaattggcgataataacttgctaagcccaagaaactacgaatctctgtagctgaagtgggctaggacaatccctaactactgaaatcttcttgggatccacctgaataccctctgatgaaaccacgtggcctagaaatgcaactaaactcaaccaaaacttacacttggagaatttggcatacaactgactatccctcagagtctggaggacgactctaaggtgctgctcatgctcctctcggctgcgagagtatatcaatatatcatcaatgaaaataataacgaacaagtccaaataaggcctgaacactcggttcatcaactccataaaaatagcgggggcatttgtcaacccgaatgacatcatcaagaactcataatgcccataacgagtgcgaaaggacatcttagggacatctgaagccctaatcctcagctgatggtaaccacatctcaactctatcttggagaacactatagcaccctgaagctggtcaaatagatcaccaatcctcggcgaaggatacttgttcttaatggtaatcttattcaactgccggtagtcaatacacatcctcatttgagccatctttcttcttaacgtacaacactggagcgccccaaggagaaacactagacttaatgaagcctttatccaacaaatcctgcaactgctccttcaattccatcaactctggcagggccatacgatacggcggaatagaaatgggttgagtgccctgagccacctcaatacaaaagtcaatatccctgtcgggtggcatactcggcaggtcagcagggaatacctcagggaactcacgaaccacgggcacagactccatagaaggaacctcagcattagaatcgcgaacataggccagataagccaaacaacccttctcgaccatgcgccgagccttcatatatgaaataacgctaccaaaagaatgactaggagtcccctccactccaaactaggcacacctggcaaggccaaggtcactgtcttggcatgacagtccagaataacataataaggggatagccaatccattcccaatataacatcaaagtcaaccatatccagaagcaaagatcaacccgagtctccataccaccaataactactaagaaagaacggtagactcgatctaccactacagaatcacccaccggtgtagacacatgcacaacagtactcaaggaatcacggggcatactcaaataaggggaaaaatatgaagacacataggagaatgtagaacccgaatcaaataacaccgaagcctatcggctgcaaactgaaaccgtacctgtaataactgcatcaaaagcctcagtgtcaggcctggcaggaaaagcataacaccggggctgagcccctccagcctgaacagaaccgggttgacttacaacggcctgacctctacctctcgtggcatgccctccacctctatgagtctgacctccacctctggcacaacgaccaccacccctagctggctgagggggtgggggtgcacctgatgcgggaaccatggcacgggaaccctgatattgagacccaccaaaacctcgagggtagaacctggagatgtgccccgaaccaccgcaagtgtagcaagtcttcgggtgctgcgaataccgaccctggaactgtccctgacgaccagaatgaccaccctaaagacactgaatcggcggtgcactgatgagagctaataatgcactacgggatacctagagtgccgactgataagccctagggggatgatccctaccaaatgaatccttgcctcaagatgaggtaccactgaaacggccgaaatgacgaggtctcttgtcagccccctgaccaccaccctgggataataccatcttaatgcgtctggccacatcggctgcatcctgaaaggagatatcaatacccgtctccctggccatctgaagtctgataggctgagccagaccctcaataaatctccaaaccctctaccgattagtggagagtatcataatagcatgcttggctagagtaatgaacctggtctcgtactgagtgacagacatagatccctgttggaggcgctcaaactgtctccgaagatcctccctctgagtaactggaagttacttccccaagaataactcggagaactgagcccacgtcaaaggtgcagacccagctggcctggtcaaacaatagtctctccaccaagtcttagcggaacccgaaagacaaaaagtagtaaaatccaatccattagactccataatgcccatgttccgaagaacctcacaacagctgtccaaataatcctggggatcctctaatggtgcactagtaaatgtagtagtgaataacttggtgaaaccgatccaatctccatagagcatctgctgacatggctgctccctctacggcggctgtcacaataccccgctgaattactccggctgtctgaggtgccggagtctggaactgagtggcaaactgctctggcatatggatagcaggagtcttagtccctcccccagtctgagatccaactgacgcagtaggaagaagaccggcctgagccacactctccatgagtcccactaagcggactagagcgtcctgaagcaccggggtagcaatgaacccctctaggacctgagctggtccaactgggactgtttgagcaggaacctcaccggcatagtctacctgtgggtcctcaactggagctgctgctctagctctgcctcgacctctagcatggcctcgacctcgacccctcgtaggagctgcaataggaggatcgggctgctgatcggtcgatgaggaagcatgcattttcgccatctgcgagagagtagttagagactcaattagtatttagaattcaattggcacgacagagaatgaaagatctgaagttattcctaactttgcagcctctaggggataagtacagacgtctccgtactgatccctcagactctaccaagtttgtccgtgagttgtgagacctaagcaacctagtgctctgatacaaccttgtcacgacccgaaatcccacctacaagtcgtgatggcgtctaacattggaccccctagacaagccaatgtttaaaataaaaaaaaccattaacaactaaaatgaacaagataattacgacaactgtgactaacaatatgaaagttaactgatttcaaaactaatatagcaagcttcgaaataaatcccataaatacaacccaaaactggtgtcacatactcacgaactgtctatgagattactaaatacaatggtctgaaaataagtacatatgactgtctttgaactatagaataagacagaactgaaagagaagggtagaaggtgacgtcaaggcccacgaacgtctgcgggtctacctcgatgtctcctgaatggactgatggaatgctccctttgtcaaagcccatcgggcccggctgcataaactgcacaacataaggaagtgcaggtgcaacatcagtacaaccgaccccatgtactgagtaagtgtcgagcttaacctcggcgaagtagtgacgagggtaggaccagaaacaatatataactgtacaattccacataacaacaggaaaaatatcgacggaaataaacaagtaaatacaaatatggggagagcatgctggggataaaagagacaacaaatactagcatagtagaacagggtatgtcatgacccgaaatcccacctttcaggtcgtgactgcgtctaacgttgaacccgctagacaagccaacgtatacaacattattgccttaatagcacaacgtaacagtatttaaaactattaaccttcaaacatttactgaaataactcgaattcattaatgtccaaccttttccgaaaacatcccacaccattaactctcgaatttatactgaacatcccaaatcacttcaaacgtttcacagcagaacaataatattacttcaacaaaactcataatgaaatgataagacaacaacaacgaacaatcccaaaaccgaggtgtcacaacctcacgaactatctaaactgagtactaaatacaaagtttgaaaagaaatatacaattgtcttgaaactaggagaaaaagtaagacaatgaggaatccaaaagtaggagagacaccaaggcccacgaatgccagcgggtataccttgaagctctgggtggactgaaggtgactccttcaatgcggtccactgcgtccgaatgcgtgatctgcacaacattaagaagtgcagtgtagcatcagtacaaccgaccccatgaactgagtaagtgtcgagcctaacctcgtccgaagtagtgacgaggctagacttagcaacgatgtacacctgtcctattctacaacatataatccagatagcaacgcaagaattagacagacaaattagggggcacgggagcagttaaggggggggggggtcaccagtgagatatgacagtatattgatcataagaaaacagataagaagcggtttaacagaaagtaccaagtaaagacaagtgcaaatgccaggaatgtaattaatggcacggcatcacccttcgtgcttttactctcttcctcactatgcaaaacatggtataatcaatgtaaaacaatcggcacgacatgtccccttgtgcaataaacaataacaatcagcacggcatgtcccctcgtgtgataaataacaacaatcgtcacggcatgtcccctcgtgcgataaacaataaatgatcaacacggcatgtcccctcgtgtgataaataataaaaaatcgtcacggcatgtcccttcgtgcgataaataataaacgataaacacggcatgtcccctcgtgtgataaataataagcaatcggcaaggcatgtcccctcgtgcgataaacaataaacgatcaacacggctttaaccttcgtgtttataataaatatgaatcgtggcacgacatcacccttcgtgctttacactcttcctcactatgcaatgtaatcagatatcatggcacgacatcacccttcgtgctttacactcttcctcaccaaacaataacagataaatggcaagagtacaacatagaggaaataagcagttcataacacccggcaaggggaaaacatcaatttggtaactcaataaatgcccgacaagggtctcagctataaccaatcgcttcaatcgtatcctctacatttggattatcaatcatatcaacactttatcaaactcaacagtcaatacttccaacaagaatagtttaccaggtaaagacagtctcataatgtgctaaacatggaaggaatactgcaatttctatcaaaatagactcacgggcatgcttgacacacattgcataggtactcgtcacctcacctatgcaatgaacatgataatcacttagcacgtagcaaataatacctattccctcaccgaagttaggcaagacacttacctcagtccaaagtatagcaatcgaccctctaagaccgcctttccttttaaattcaactccggaaccacaatatctaagcataattaacttaagtgtatcaataataactcaataacgccatcccatagcctaaatacacaattcctaccattctttcaaaattcccaaaattcgaccccgggcccacgtggtctaaactcgaggttcggaccaaaacccgttcacccattaccccacgagttaaaatatatgatttgtttcaaaatttgaccccaaattgaggttgaatcacccaaaatcccataagccctaattctacccaaaacccttaatttctactttgatttcatgtttttaggcctagaatctagcgtttgatgaagaaaagtggaagaaaacggagttggaatcacttacctatggagttatggcaatgaaggtcttcaaaatcgcataagggaggagtggggaagaagaagagggggaaaaataagaaaaatcccataatgggttttttttggacttaagaaaatcactggacgaaattgcactctgcgatcgcagaagagaagctgggcgaccctatgcgatcgcagaaggagacatgcgatcgcggacctagcggacttgaccttctgcgatcgcagactagctacgcgaccgtagagcaactgccccagcccccaccccagaccgcatacacactatgcgatcacagaactaactatgcgatagcacagtgccacagaacctcccccaccttactacactatgcgatcgcgactcagcctatgcaatcgcatagtgttaaacaccagatttttaccctttaactcaccccgttagctacccgaaactcatccgagccctcgggtctcaaaactaaaaacacacacatctcccaatacatcctgcggacttattcacgctttcaaatcatcaaaatcatcgaattaaaccttaaaactcatagaatttcctcaaacttcataaacttctaaatttccccctttttaattcgaattacgttatctcaagtccgttttacaccaaatttcacaaataagtcacataacatataataaacctgttccaggctccggaaccgtaatacgggcccggtaacacggtttccacatcaaagttcattttcaaaaacctttattattttcagaaaacaattttctttaaaaattcatttctcgggattgggacctcggaattcgattccgggcatacgcccaagtcccatatttttctacggaccctctgggaccgtcacatcacgggtccggatccgtttaccaaaaatgttgaccaaagtcaactttattcaattattcaattcaaaaatcccatttttatcaaatttttacatggaagtttctcggttacctgcccgggatgcgcatgcatatcgaggtgagattgacggaggctttcgaggcctcggaacacagatttagctggaattacttaggatggccttttgggtcatcaaagggtagcaactgaaatgtaaaggtaaaagcaggaatgtaacatctcagaacagataatgaacaaaaaaaggcacggcatgtcccctcgtgcataatctcacaatcactcggcacagaatgtcccctcatgcatatatatagaaaaatcactcggcacgaaatgtcccctcgtgcaataaataatacacaatcggcatagaatgtcccctcgtgcaataaataataaacaatcagcacgacatgtcccctcgtgcgataaaaaataaacactcggcacggcatgtcccctcgtgcaataaacaatacacaatcgacacggaatgtccccttgtgcaataaataataaacaatcggcacgacatatcccctcgtgcgataaataataaacactcggcacggcatgtcccatcgtgcaataaacaatacacaatcggcacggaatgtcccttcgtgcaataaataataaacaatcggcacagcatgtcccctcgtacgataaataatataaaaaaacaatataatgtgaaaactaacaatgagaaatctcaagtatacaaaaatattcaataaaattctatcgtctcggcaagggactcggctataaccaaaactcgttcaaaagtgtaatttcaacagtaagaacctcaactgaacaattagtcaataattccccacgtcatgaaacaacatcaatgaatcgcttctaaatcaccagttattcacagtacagagaatatcaagaacacagtataattcctcacaattgactcacgggcattcttgaccgcaacatataggtactcatcacctcacctatacgttggacatgaattacacatagcaaataaaactccacacctattccctcaagctcaggttaggccagacacttacctcggctccaaaatgcaagtcaagcctcagtcacagcctttcctctcaaacccaactccgaatcgataatatctagacataattgacttaaaaacatcaataattattcaataactcaatcccaaagcctagttatactttttctatcattcgtccaaaaataccaaaatccgaccccaggcctgcacgctcgaatcccaaaaattctcgatgggatcactcacccgtagcctaaggatcattaataagaagtttccacttgaattcatagcattaacggacaatacgcaatttttctcaagaaccctgaattacctacccaattcttgattttccattaatttagtagtaaaccctattaataattcatgcatgaaactagtattaggaaggaattaacttaccttaacagtagctaggtcgtggtgtggacccaagctcacaagtctctaatggagtttttggtatgaaaggaatgaagaaataccgaaattttgcatttaaatacagtctggcctacagaggttccgcacctgcggctcgaggaccgcacctgcggtctcgctcctgcgatttggggctcgcacctacggaactgggcaagaggggctggggtcgcacctgtggagggattaccgcacctgcggttccgctcctgcgaacctttgtccgcacctgcgataaagggggacctcacctggggtcacacctgcgatgcttgggaccgcaggagcggtcgcgcacctgagactaggcaaccgcacctgcggtcacaccagaaacaggtgcaccagcagctattttagctggtttttagcctcgtttggtgtccgggaggaacctgggcccacccgagcccctgtcctaatgtaccaacaagtcctaaatcataatacggactcgctcgagccttcggaacacccaaaacaatgctaaatctcaaaatcacaccccaaaacccctaaaaccataacttaagaaacttcaagttcttgatttctatatcgacgtgccggaccgacccatacaattcggaatgacatcaaattttgcagacaactcacgataaccatattaaacttgttccgggctccggaaccataatacgggcctggtaacgctgttttctcatcaaagttcattttcaaaagcctttattattttcagaaaataattttctttaaaaattaatttctcagacttaggacctcggaattcgattccgggcacacgcccaagtcccatattttcctacggaccctccgggaccgtcaaatcacgggttagggtccgtttaccaagaatgttgaccaaagtcaactttattcaattaattatcataaattcaacttttcatcaaatttccacttaaaaacttcccggctacgcgcccggctgcgcacgcacatggagatgagattaacggaggctctcggggcctcggaacacagttttagtcaaatttacacaggatgaccttttgggtcatcacataaatgataatagacaaggggtaaatagacatgctggacaaacatcaaacagacaattatagtttgaacatgctgattaaatattgaacaaaacaggattagacatactaagcaaggcagtaaacacgaacaaggattgaattcatgaataatgaactagtacagtaatgaaacacatagagtttaggtttcaaaatataactgagacataccggctaaggaagagagcacagaatgtaaagtaggcgcagttcaatgtctagccttggcttatagccggcttgatcatgattatcacaagtagcagagaagaaaagagagttttgagtgtaagtgtgtgttttgaactgatgttcgtgtgttaagaagtaaaacaaaggagtttatatagtagttcaagagtagagcaaataaggtaacaatatcaacttcagtcaatcaagggaggatcacagaataaattacatggaaaaaaatcagtatagtcttcccttaattaagggtaattaaccaacggtaaggacagggaatatttaaggaaagaaattcaaatcaaacttaagcaaagagtgaataattaggagtctaattgagaaaataatcgtgcaaggaatcagtagatactacatgtaattaaataaggcaagaagactaattaagtcataaacaaggaaataatcaagaatcatgcgcatgaattttttaacagagcaaatcactcaacaattctggaaagaatatatcaattcccataaacaaaataggctgactaaaactttaggaacacagagaaattagatggaaaataattcaaaaaaccctaatagagattaattaggataaaaatcacaaagcaaggaatttgactaaggaaaatcgtgtaaatcaaaacacaggattaaccaatacgacttgtaacattgaaaagctcagaatcgaagcaaaacatcagacagttagagttttagcataaatcgactagggcttaggcagccttagcataaataagtcaagaacacttaaggacatatgattaagcgtttaaaaatcagaaaaccttttgagaagatgacttaagtaaaccatagtttaggaaaaacgggaaatcagttgaaaccagaaaactttcaaggaaaacatgtgagatatgttcgattcgtctcagatctatacagatcttagaagatcagagataaaaattagggtttttagaaagtaaaatagagacgagaacatgcctttagaaaaccacggattcataaaaaaaataagaaagattcttactcaaagtcgagcaactagcctaaaacatgcaagaaatccaaaggtgcaaaatagacctgcctaggtcccttgaaatctcctcaaggatctaggagacggataagccatagcaaatgggaggccgatagaggcctgagatgatgaagaaacaccatggaatagcagtataagctggtggcaacggggaaattaaagagcgtttgagagaagaaggggaagggttacgacggggggaagggagtaagtgattagggttaggcggttttggtcagtttaattatggtaggaaatatgttgaccgttgataaaaaaacgatcaatagccaagattggctacggttattgggtcgggcagcctaatatttgggcctaaggtttctgggctaatttataaggggtattgggctggttatttaggctagaattgaaaaataaaagggttgtttattaaatacccaaaacaattgaatacaattaatttgtaaaataattaaataattataaaaatgattttcatgaatagaaatattttaaaaataattatttagtattttaaaatacaatggaccaatttctagtaaaataacataaaaatatatgcatgggatacaattgaaaagttttgtaattataaccaaaatgtgccaatttggctagttatgaaataatttggacttaataggaccataaatagtaatattaaatcaagaaatattttaaaataatttgtgatgcagatttataattatttatatgaaataaaatgctagggccaattaatttaaatcgtagaaattatgaaaaaatgccaattgatgctaatgcatgatttagaagacatatatgcatttttgaaactactttaggaaaaattgggtatcaacagctaacgctacgcatttgcgtagagcaaacccccaatgctccgcgttcgcgaccatggtctcgcgttcgtgtgtcacgacccgaaatcccactttcgggtcgtgatggtgcctaacgttgaatccgctagacaagccaacgtttgaactaaaataaactcattaacaactaaaatgaaccagataattaagccaacagtggtcaacaacatgagagtcaactaagttcaaattaacatagcaacttcgaaataaaacccatatacatatcccataactggtgtcacatacttacgaactgtctatgagattactaaatgcaatggtctgaaaataagtgcatatgactgtctttgaaactataaaataagacagaactgaaagagaagggtaggaggtgacgccaaggcccactaacgtctgcgagtctacctcgatgtctcctgaatgaactgatggaatgcttcctccgtcagtgtccaccgggtccggctgtgtagtctgcacaacataaagaagtgcaggtgtagcatcagtacaactgaccccatgtactgagtaagttctgaacctaacatcggcgaagtagtgacgaggctaggaacgacaacaatatacatacctgtgcaattctatataatgacaggaaaatatcgacgaaaataaacaagtaaaaacagatacggggagaacacgcgtgggataaaaggggcaacaggtacttgcactgtagaacagggtgataactgaaatgtgaaagtaaaagcaggaatttaacatcttagaacaggtaatgaacaacaacaggcacaacatgtcccctcgtgcatagtctcacaaccactcggcacggaatgtcccctcgtgcaataaatagtaaacaatcggcacggaatgtcccctcgtgcgataaataataaacaatcggcacggaatgtcctctcgtgcgataaataataaacaattggcacggcatgtcccctcgtgcgataaataataaacattcagcacgacatgtcccctcgtgcgataaataataaacattcagcacgacatgtcccctcgtgcgataaatgatatagaaacaacaatataatgcgaaaactaacaataagaaatctcaagtgtacagaaatactcaaccaaattctatcgtcccggcaagggactcacctataaccaaactcgcttagaaatacaatcttcaacagtaaaagcctcaactgaagaattaatcaataatttcccacgtcatgaaacaacatcaatgtatcacttctaaatcaccaattattcatagtacaaagaatgtcaagaacacggtataaattcatcataattgactcacgggcatgcttgaccgcaacatataggaactcgtcacctcgcctatacgttgtacatgaatacacatagcaaataagactctatgcctaatccctcaagctaaggttaggtcaaacacttacctcggctccaaaatgcaagtcaagcttcaatcacagcctttcctctcgaatccaactccgagtcgataatatctagacataattgatttattaacatcaataattactcaataaaccaattcaaaagcctaattatacattctctatcattcttccaaaaataccacaattcgaccccggacccgcatgctcgaatcccgaaaattctcgaaggaatcactcacccatagcctaaggatcatcaatatgaagtttctacttgaattcttagcattaaacggacaatacgccaatttctcaagaaccctaaatttactaccaaattcttgatttttcattaatttactagtaaaccctattaataattcatgcatgaaactagtattaggaaggaattaacttaccttaacagtagctaggtcgtggtgtgttcttcccaagctcacaagtctctaatggagtttttggtatgaagggaagggagaaatcccgagttttgcatttaaaaatagtctgccctacatgggttccgcacctgcggctcgaggaccgcacctgcggtcttgctcctgcgaactggggctcgcacctgcggaactgggcaaaaggggctggggtcgcacctgcggagggattaccgcacctgcggttccgctcctgcggacatttgtccgcacctgcgataaagggggacctcacctggggtcgcacctgcgactgggaaaacgcacctgcggtcacaccaacaacagttgcaccagcaactattttagctggtttttatccccgttgggtgtccgagaggcacctgggcccacccgagcccccgtccagatataccaacaagtcctaaattataatacggactcgctcgagacttcggaacacccaaaacaacgctaaatttcaaattcacactcctaaacccctaaaaccataacttaagaaacttcaagttcttgatttctataaaaattgcggccttcctttgctcctgtcggcgggatcagccagtgtccccgtgtgtaaggccctttcctgaaagaggtcgacttccccttttaataataagaaggtaagcatcaaagcccagaaaacccaacctatacaaagagctcttttcagcccctactcctaacaagtgaaagttgctggcacccacccggcaatctacaatctacccagcgccttagtttatgttgaataggcatgaccgacctatacaactcggaatgacatcaaattttgcagacaagttataaatgacataacggaactattcccggtatcggaatcacattcggacctcgataacataaaatcatgttccaaaccaaatttcaaattttatggaaatccttatttctatataattttctcaaagcttcattaactctcaattttccattttcgatccgaaacacgtcaaatcaagtccgttccttaccaaatttcatagataactcaaataacacatattgaacctgttccgtgccccggaaccataatacgggcccagtaacataggtttcaaatcaaattccattttcaaaagtctttattattttcaggaaacaattttctttaaaaatttatttctcggacttgggacctcggaattcgcatccgggcatacgcccaagtcccatattttcttacgtaccctccgggaccgtcaaatcacgggtccaggtctgtttaccaagaatgttgaccaaagtcaactttattcaattaattatcataaattcaacttttcatcaaatttccacataaaggcttcacggctacgtgcccaggttgcgcacacacatcgaggtgagattaacggagactcttagggcctcggaacacaattttagctaaatttacacaggatgaccttttaggtcatcacatcatgtagtgtaaaatcctccgacaacccagatccccttcgcgactgcgaagcacaacgcaccagaaaatcagcttcagcaaaaacactagatttttctaagtccaattcatcccgtagcctatccgaaacttacccgaatccttggggatccaaaacaaacatgcacacaagtccttaaacatcatacgaactcgctcgcgcggtcaataccccaaaataatgcctagaactacaaattgggcaccaaatcagtaacattttcaagaaaactttaaaacttctattttcacaaccaaaacgcctgaatcacgttaaatctactatgtgtcacgatccaaattcccaaccctcgggatcgtgatggcgcctaacaccacacttgctaggcaagccaatgttagaaattatacgatcattttcttcttaactttatttaaacacgcatgaacaaatacaattaaacacaaaagctaatactttcccataaatgcaatcaggatttatattcgaagtaatggaagaaccaccactaatgctaattacataactacccaaggtctggtgtcacaattcacgaagtattaagaatgctacaaataatgggctgaaagaattatgtatctgttttgaaagaagtaaaacagtgtcttaaaataagacaagactccaagaatctgcggacgccactagatctacctcgtgtctctgaatgatgatgacaactactaaaaatctcctcagtctgaccggtacctggaactgcacaaaagagtacagagtgtagtattagtacaactgacctatgtcctgagtaagtgccgagcctaacctcgacgaagtagtgacgaggctaaggtgaggcaatgtaacgtaacctgtaacagtatatatatgtaacaaaataagaaaattctaaaggaaacaagaacaataaacttgtaacaataaataaaataatttagttgcctctttccgcctcagctacaaccaaaatctcacataaattcctaaaattccaagttttgacttttagaataatagtaagtgtaaaatacgtaaaatagtaaggtaaaacaataatatttcaaatctttgctttttcttggaaaatcagtaaaaacataggtttcctcctttattgccccttgttgcggcgtgcaacttgctcccacctgcccacccttattacacctccctatataccacccttattacacctgttgcggcatgcaacccgatcccacatgtccacccttatcactccttgttgcggcgtgcaacccattcccaccagacatatcatatcagtttatttatttatgcaaactttcacaattcaggccaaaccgttcacaacatttttgtctcaacaattgtaaacagaaaagagtataactcataagctttatcaaatatcgtttcacgatgaaaccaaccagaacatatgtaaataccgtaacactgtcgtccaactcaatctttatgtatcacaacaaatccaaagaaacatccaacacttctaacatacttgaagcaatacttgacaataaattaatgaaacgaaatagacatgtaaacgtcaatgatcctaaaacaatcaaaccaggaagcaaataattgaaaacggggaagggatgatgttatgcagatagtttggtggtgcatagatactcgtcacctcacctatacaccccacacgtgcgatttcacataaaaatcaagttggggattcctataccctcaagtcaaggttaaaccaagcacttacctcgatctcacaagcaaaacactgctctagcacaaccttttctttaacatttgcttctaatccgctcgaatctaatcacaattggttcaatgttattaattatagctccaaggaatcaactttattgaaaaactatggatttcctatgttttcttatcaactacaaaaatcaacctcgggcccgcttggtctaaactcgaggttcggaccaaaactcatttacccattctcccccgagcccaaatatacaattggttttggaatccgatctcaattcgaggtctaaatccccaagttttgaaattcctaagttctacccaaaaatcccaatttttttaccatgaaaactctagatctttggttgaaatcttgttaaaagttgttaagggttgaaaggaattagtttgtgatcacttaccaatgatttggagaattttgggtcttctgaaaatcgcctatggaggtttagggtttgagagaattgaaaaaaaagtgaaaaacccatcaaaattctcacttaataccttgccgttatcgcatttgcgaacaggggttcgcatgtgcgaacacttcaatttcctgctaccattgcaaatgtgagaaaaatatcgcgtttgcgatatatggtaaattcgcatttgcggccagagtctcgcatttgcaagatatagggctggcccaggactttgcttttgcgaagtctgatctcgcaaatgcgagatcagaggcctgccaacaccagattttgctgtgcaatctttctctaagtctagacactccgtagcgtacccaaaactcatccgagccctcgaggctccaaaccaaacatgcacgcaagtctaaaaataccatacggacttgctcatgcaatcaatccatccaaataacatcaaaaattacaaatttaacctcaaaactcatgattttctcaagaacactcaaatttgctaacttttcaaccagatgtccgaatcaccatcaaatcaattctgattctcatcaaatttcatcgataggatataaatatcacaacaaacttgtccggagtctggaaccaaaacacgaaaccgatatcatcaatttcacatattatttcgtttctttatttcttgaaataaccagcataaaatgtttcttcaaaaattgttttttaaggctagggtcctcggaattcagttccggcatacgtccgagtcccatattttactgcgaaccttccggaatcgtcgaaacaccgatccgggcccgtttactcaatacgttgaccagagtcaactaaaattaaattttaacttctaaaaattactatttctcatattttcacataaaatctttccggtttcacgctcggactacgcacgcaaattgaggaaattaaaattagtcttttgaaggcctttgagcctgtaacggagtcttacttcataagatgaccctttggctcatcacactccgtttctcaccaaatttgacagaaacatcataaacatcacagtggacctgtaccgggctctcgaaccaaaatacggacccgatatcaataaatcagaaaatcagtcaatccttaaaaaccataaaactttaaaactttcaatttttaacaaaaatcaataactcgagttagggagctccgaatttgattccgagcatacgcccaggtcccaaagtacaatacgaacccactgggatcgtcaaaacatgaatccgagcctgtttggtcaacatattgaccgaagtcaacttaaatgaatttttaagtcaaaattcttattcttatcagtttttaacatataagccttccgaataactaccagactgtacacgcaaatcgaggaaggctaacattaggtttttgtgacctcgaaacacagaattatgttccaaaatataagatgacttatcgtgtcatcacatttccaagtatttactactggacgattattataatatactggagttgtgttgattacttgtgtttaatgataatttgcatgttttctttatatggtatttgattatgttttttaattctagcccagtatttgtttatggagttttatttctgtaataaatttggtgcagtatattatacgggaagtccgtcttctgaacgcttgtttcccagtattttatactactagatgattattataatatactggagttctatttatttctgattacttatgtttaatgaaaatttgtatgtgttttttttggtgtttgattatgttttttagttctagcccaatatttgtttatggagttttatttttgtaataaatttggtacagtatgttatacgagtctgtcttgttgtacactttttttacttaatgattattataatatactggagttctgtttatatctgattacttgtgtttaattataatttgtatctgtgttttctatttggtgtttgattatgtttttttaattctagcccagtatttgtttataaagttttgtaataaagttggttatattatacgggaaattttcatctgaagcttttttgtctagtatgttatattggataatattataattacgggtgtcaatggttcggttcagtcgattattttataaaatttgcaccatactaatttttcgattattttattatttataaccaaaataagacttttcaaacccttcccaatcatgtcggtttctcttcgatatcggtacggttcggtttggtaaattttcggaagttttttaatgtgaggtaaaaatcactagtagaagtagaatgcaataacatacataatttttataggaattctcaaaactctctagacatttttagtgtctaacgagtgatgaattaagaaaacatgaaagaaactaagcaaagacaaaaataatataaatcacacgaatgaaaagatattaaccaagctaggattcaaaaataaagtatatggaagattaaatattcaaaaagataaatttaaatcatacaaaaggaaacatattatatacattgtagtttgctactcataatcgctagaatatcttgtgtcttgctagcagatatgctgaaaataatttagtttcaatagaagtagaataatactgtaacgcccgaccggtcattttgagctctagctcgtcgttcagcagtttgaggacatgagcagctcgtttaaggtattatgactcgtaggcatggtcggagttggatttcgggaagttcggagtcaaattggaaagaaaattctcatttcggaagccttaagttggaagaattgactaagattagaattttgagtaaactacctcagaatcaggatttgaaggttccgtcaggtttgtatgatgatttcggacatgggcgtatgttaggatcgggctttggataacccgggagcgtttcgacatattttgtggaagttatcattttagaaggtatttcataagtctgggttgaaaggcattttagtgatattgatgttcgtttgggattccgagtctgggaatagtttcgtacggtaattctggagttgggagcgcgattgtaagtgaattcgaaggtccgtaggtcattttgaagtcatttggctaaagatagaaattaaaggtttttgagaagtttgaccgtgagtttgactttttaatatcggggtcggattccagttccagaagttggaataggtccgtaatgttgaatgtgacttgtgtacaaaattgtaggtcaatcggacgtgaattgataggtttcggcatcgaatgtggaagtttcaagttctaaagttcattaagcttgaattggggtgcgattcatgatttcggcgctgtttgatatgatttgaggcctcgagcgaattcgtatcatgttttgggacatgttggtataattggttaaggtcccgagggactctggtggatttcggaaggttaacgaaatggatttcggacaaaaaaaaaaggaaaacaaaactactggaatttctgctgcacttttggacagcaactggtgcatgatggaactgactttggagccatatatatcaaaatctataatgaatctaaatatttgaaaaacataaaagttgtagcccttgtattctagtttctataaagttaaaccatgcatgatttggacatttcatcagaaagttatgatcgattgaagatggccggtgaagctgtttcgacagaattttctgatgcatggccgactttggaagctcatatctaagagttatatggtgtaaaacctatcaaatgaaagatcttcgagtctagtttttaaatcttcaaaccgtttgttatttggatatttctacaaggagttatgggcattgtaatagaaggtgtacattagggaaatattgtaataggatgtacaacctgcacaacgcaaggtacaactcgatgaagcacctgggcagattgttttaaaaacgagttttggcccatttcttccatttctttcatttggcttggacgattttggagagctcaagcagggattttcaccaagcagcactaggtaagtgatttcttcctatttttgagttaaatatgtgatcttacatggatttagacatggaaaatttgtataaatttgggatttttggggaagacctagaatttggaattttggacttttaccatgaatttgagcatgaaaattagagtaaattgtatatttgagttagtaaagctatggatagaatttatcttcgagaaatttcggaatcctggctcgtgggcccgagggaattttggtaaacattttaagcggaacagggaatttagataaattgaattatcataagtattagagtatattttcattggttttcccgttatttggctagttttgggacgttgtgcatcaattggagttgtcggaagggcttggaggccggttatggaatttcggagcgaggtaagtctcctttctaactttgtgaggaggaattgtccccataggcgaactaatcaaatatgtactactatttgtgggggctacgtacgcacgaggtgatgggagtccgtgcgtagctactattatgcttatgtccgggtagcctaggacccactatcatgctttacttgctgtacttgtaactttgttggtaaaacaagactgtctaatatcattgaactagtaaatgaatgttttggtaggttaaaacttcattatcctaatcatctaaagagaaactttatcctttccttggctaaatatttcctgatgaattcctgaagtattactagaatgtgtgtatctatatgggtacccgagtcgcaggtatgattcgcgagcgaggtaactctattgtttatatgtgacccgagtcgcaggttagttcgcgagcggggaaaatagatgcatctatggtttgagcatttcgaccctttggtagtgcatattttattattgttggttcgggccgtttgaccctcggcatttcttgcgcatgataattgttgcgtacttttatgtgatttatacatgtttactgtcctggatattataaattgtcaactgaaatgacgaatatttaaattcttaaatgtgaaggaagtttctatttcttatcactacgcattaaattgcctatgatattcatgcttagtgtctccctttatttttattaaattgacctctagaaagtgtcaaattcgacctttcgtcactacctcttcgaggttaggcgggatacttactgagtacacgttgttttcgtactcatgctgtacatttttattgcataggtacatccatatctagtggccctgcttgacgcagtgatgtggctgacttggagatttaggcgggctgcaccatctggtgtcgacctgcagccgacggagtctccctcatatgtattgtactatatttattttaaattccttgttcaatttgtatttcggacaagcattgtagtatctataaaattcttagaatttgctcatgcacttgtgacaccgggttctgggatgtgtttgggatgtccttattaaattggattgttaatctaccgtatttacttagcatatttttgttcgattattattatgtaatgaaatgaaaagtaatgattttcgaatattaaagcaggaatttaacttaaccatttattgattagcttgcctgacaatggtgtccggcgccatcacgaccttatggattttgggtcgtgatagcgtggtattagagcactaggttcccttaggttttacgagtcatgagcaagtctagtagagtcttgcggattggtacggagacgtctgtacttatcttcgagaggctacaaggctgttaggagtacttcccttcttgattcctcatcgtgcgatttgattcctttgaggcttatgcctatgtttcttccaacccaatcttatacgtcgcgaagcacttgctatgaatcatggatttgaggaattgaaatggtgctatggatatggtgcgagatgttttccatgtgtagttggttggggttgttgttgttgccctgtaaaagaatattatgttgtttcagctcagtagctgtgtttctgagaactttgaggctatgctcagattgttatgatgcttataattggttatcgtgcggtgttgatatgatggtagaatgcttgtccatatgtcggggtaatgaatgacttgaagggaggtcttctcagagcgtaaaattgagatttcagtattttagctccggcggaggaagggcaattgaactatgaatgttcaagtctgggggataaagtaataagacttggtgttatcaagcgaggtggagttttcatctgtgatgtggtatcgttgtttttgatcgaatagactgtgttaagttcgtcggtgttatagttcttcggttgcattgggtcagagtgttgtgaagtagtattgaagaagtggttgtcagatatcgtggtgtgcggtggttcaggactgaatagttatttctaatgaaggcagatcgagaaagatgttcttcgggaaggcctaaggttgtggtgatctgctggtttaagtgctacggagaatgatattgaattgaggcaacaactgggcaacatacgatgaaggaagatatgtgagaactcctaggcagtggttccatttctaggaggccaggtgtaagaagcggaagtcgagcagtcacatagagggggagtttgaccaaagtgggagaacgacaacatagcggtaaattagaagatattgtagcctatttagtagatgtccatgaggagcggatggactggtaaagttggtgaatgaacaagcttaggatggggtattgatgttgtagagagtgcagtacaacatcgttagaaggtgttagatgtaatttccacaggtgggttaactcctttgagcaggttagcagtcgtgcggttgacaagtttctgcgagtaattttagtggctattcggtaggagaccgaatatgtgaatgatgctagagaatttgagtattcagggagtgctaacataagaatttaagaggatttgatggattggttgggcaagatcatgtcagcaaagaaaaaataatttcggtggggtccagagtggtgcaaggagtagcttctggctaagtgggagagttccaccgcatgctattgggttgcaagattatattctcataggttcgaggattatcagcgtattggcgagttattacagctaaggggaaaggagtaaactggttattgtgcatgggatttgataaatgtgtgcaaaagttggccctattggaccagggttaggctttggaagattcagaatttatgcttaatgcataggcgagttgtaagggtagtgactcagtcacgtgcttcattgagaaggtgttcatgtgctagaagagccttggagttgattgtattcggggccaattagagtgggtgactctcaaaagcggacctagtgaattcgaaagttaaggatgcggtgtttaagggtttcaagcaacagtatgattaagaatcgagcttttgcagcgtaatttctgagaaagggaaaatggtcagagtgttctatgttattttcaccgtgcagaatagtattggaggagtgaaaataaataaataaactccggattgtagaagattattaggatagtatgagaaggtttgctggattgggacaacatggtctcgtgaatcaaggtcactcgggatgagtgaggattgagtttgatatgtgtcgtatgggttgctattattcttagtcaattaaggatgattaaaagaagttagattggttagccatggttggaatgacacatgtgcgctagtgatcagttccttcggtgtgattgagttatgtgtgtggtttatgcagtgtgtgcggggcttgttggtcgtcgtaatggattttatttgaaagccttcaagtattatggcttgtcaggtgtaggtggatccaggaaggagtatggtggtatagactagtccttgaggatttgcctattttgtgattatgagaatttgctcgtgtgttgttatggtactcttgaattgaggtgagaagagaaaacaagggtttctatatgaaggggtgttcaccttattagtggttcaagagttatgatggaatttctgctctatctcatattggcatgcaggtgcagtaagcattatgtaattggaagtaaggatcaagattgcggttcagtgttaataaagatgacatgagctcggatgataaaggaaaaatggattagaatgtttagggtaagttggtgatgacttcagcgtcatctgagatcggtgtttggtgaaagaggttttgcatcccggttataggttcttgatttgctttacatcgttagcgtggtcggcggtatggatgtgcagaattgttatctagtgtatgaggtagtggaagtgtgctccacgggaagactgtataagtgcgacatgtagtcacttaatggattgaagatttagatcaagtataaagaagtttaatattgcttatttgagagtttatgactggaaggtgctcagttcatctttgttgcagattgtagggtgtagtcccggctatgatggtggtttttgcgtgttatgggaagaagtgggctattatggacccagataaggctatcggccttgttcagtgcgagcagaatcgacttgaagtgtgcaaatgaatttaaataagatcatgggctccacgtgggtcagatgtgttcatttcagtatagctctcctcaaggaggggtattggaatattggatgttgttccatcttcgtccatttcatgtaatattacgattgtgccgtgtgagttgcgaaacggcttgataatttcttatgtgctgagtttccgtgtagtgatgaggttatgtgagcaggagggctcttgagattcagagtatatacatatcgcacctcagttgtgcttaagttttgtagcgtatggcttatcagtctccccaggatggtattatgcacttagcgtgcttgtgaccgatattcaataatttgtaatagtaagcaattcagctccgtgtatatctccttatatgaattttatgatgggatcgggtggcacgccgccacaggtatgttatttggattaggttgcatgccgcaacagtgtgatgttgagtacgattccctataatcattttttcctatgttttgcttcctattttctgaggaaagttcatattagttgcgtgagtcgagtagtcccttcctgagtcattttcttaagtatcaagttcgagttgtggcctattggcgcattgtggtatcgtgtgagactgatggtcctgtctgggggtgatttgttgactgagcagttcatactgggtgagacgagatttatggattagggatcggtgcgataagactacgtggaagtatattacgggacaattaccattatttggttcgtaatgagataatgattttagtgaagaggaaagattcaatgtttggttagctctgcagttggttagaaatttctacacatctcctccgttgtggtggtatcgccagcattatatatatatatatatatatcataaggtgcattgggagcatcagattcgtggaattttggctattaaggttcagggagtgtcattgtggttagatgatgaattatgcggtgcatggtgctaattcagcaaaggtatgcagtcatgttctggtacatcgtgtggtagttgatacggtgattatatattggaaacaggcctggcagaggatttcagatgttgaaacctggttctaaggcccatttgcctaaataaaagaggatatcttcagaattattcgagcaagtgtactcaactgggttgtggtagcacgggaaggtacacgaggtgttaaacagtgatttcagataactccagagcaattcttagcacgttcgaggacgaacgtatgtttaggtggggaagaatgtaacgacccgaccggtcattttgagctctagctcgtcgttcagcagtttgaatttcggttagttcgaagtcaaattggaaagaaaattctcatttcggaagccttaagttggaagaattgactaagattggaattttgagtaaacgacctcggaatcaggattttaaggttccgacaggttcgtatgatgatttcggacttaggcgtatgttcggatcgggctttggataacccgggagcgtttcagcatatgttttggaagttagcattttagaaggaatttcataagtctgggttgaaaggcatttcaatgatattgatgtccgtttaggattccgagtctgagaatagctccgtatggttattatggagttgagagcgcaatcgaaagtgaattcggaggtccgtaggtcattttgaagttatttggctaaagatagaaatttgaaggtttttgagaagtttgaccgagagtttgactttatgatatcggggtctaattctggaagttggaataggtccgtaatgtcgaatgttacttgtgtgcaaaatttgaggtcaatcagacgtgatttgataggtttcggcatcgaatgtggaagtttcaagttctaaagttcattaagcttgaattgggatgcgattcatgatttcggcattgtttgatgtgatttgaggcctcgagcgagttcgtatcatgttttgggacattttggtataatttgttaaggtcccgagggcctcgggtggatttcggaaggttaacgaaatgaatttcggacaaaaaaaaaaaggaaaaaaactgctggaatttctgctgcacttttggacagcaactggtgcatcctgaagctgaatatggaggcttatatatcacaatctataaggactctaaaaatttgcaaaacataaaagttttagcccttgcattcgagtttccataaagttaaacaattcatgatttggacatttgatcagaatgttatgatcgattgaagatggctggtgaagcagtttcgacagagttttctgattcatggagcttactttggaagctcatataccggactatataaagcgttatatggtttaaaacctatcaaatgaaagatcttcaagtctagtttctaaatcttcaaaccgtttgtcatttggatatttctacaaggagttatgggcattttaatagaaggtgtacatcagggaaaaattgtaataggatgtccaacctgcacaacacaaggtacaactcgatgaagaacctgggcagattgttctaaaaacgagttttggcccatttattccatttctttcatttggcttggacgatattggagagctcaaggagggatgttcaccaagcagcactaggtaagtgatttcttcctatttttgagttaaatatgtcatacatggatttagacatggtaaatttttataaatttgggatttttgggaaagacctagaatttggaattttggacttttaccatgaatttgagcatgaaatgagagtaaattgtatattttagttagtaaagctatgagtagaatttatcttcgagaaatttctgaatccgggcacgtgggctcgagggcattttggtaaacttttcgagcggaacatggaatttagataaattgaattatcataagtattagagtatattttcattggtttgcccgttatttggctagttttgggacattgtgcatcaattggagtcgtcagaagggttggaggccgattatggaatattggtgcgaggtaagtctcctttctaactttgtgaggaggaattgtccccataggcgaactaattaaatatgtgctactatttgtgggagctacgtacgcacgagatgacgtgagtccgtgcgtagctactattatgcttatgttcggatagcctaggacccactagcatgctttacttgctgtacttgtaacttcgttggtaaaacgagactgtctaatatcattgaattagtaaatgaatgtttaggtaggttaaatttcattatcctaatcatctaaagagagaattatcctttccttggctaaataattcctgatgaattcctgattattactggaatgtgtgtatctatatgggtacccgagtcgcaggtatgattcgcgagcagggtaattctattatttatatgtgacccgcgtcgcaggttagttcgcgagcgggggaaatagatgcatctatggttcgagttgttcgacccttcggcaatgcacattttattattgttggttcgggccgttcgaccctcagcatttcttgcgcatgataattgctgcgtacttttctgtgatttatacatgtgttactggccttgaaattataaattgtcaactgaaatgacgaatatttaaattcttaaatgtgaaggaagttgttgtttcttatcactacgtattaaattgtctatgatattcatgcttagtgtctccctttatttttattaaattgacctctagcaagtgtcaaatttgacctctcgtcactacctcttcaaggttaggcgggatacatactgagtacacgttgttttcgtactcatgttgtgcatttttattgcataggtatatccataactagtggccctgcttgacgcagtgatgtggttggcttggagacttaggcaggctgcaccaccatctggagtcgacccgcagccgacggagtctccctcatatgtattgtactattttaattttaaattccttgtccaatttgtatttcagacaagcattgtagtatctgtaaaattcttagaatttgctcatgcacttgtgacaccggtttctgggatgtgtttgggatgtccttattaatttggattgttaatctaccgtatttacttcacagatttttattcgattattattatgtaacgaaatgaaaagtaatgatttccaaatattaaactacgaatttaacttaaccatttaatgattggcttgcttgacaatggtgtccggcgccatcacgaccttatggattttgggccatgacaaataattttggaaattcggattttgagtttaattactcgttgacttttaaccatttttataattccaatgccccaaaaaattaatgcattattatttttaaacttaatgtataaatatagtttttacatgtaaatttatttttttggtttattttcacaaaataaaaaattaccataattatctatacaattataaaattatataaaaacctatgattttattaaaagaaacctaaaaatcggttcggtatgatacggttcggtcgatttttaatatccattgacacccctaattataatatacttgagttttgtctgattccaatatattatacgggaagtttgtcgtccgtaagcttgttgtccagaatgttatactggatgattttgtttatactagagttatgttttatttgtgattacttttttttcccaatgatttttgtctttgtcttttttaatatgctttttcgttatgtttcttctttataccccagtatttgtttctgaagtttcattatttctacttaatttgatccagtatattatacgggaagtctgccatctttaggctttgttgtccagtacgttatgctggatgagctctatttatacgggagttctgtttatgtactagattctgattgtttttactaatctaatttgtaatatgcgttgttttcatgattatacagaaatggaaccttcaagtagtatattgatgaggcagatagattttttgagtttaaggattgggtttctgctgattattactggaaaggtgatagaaattttaacaaattatttcatcctttttgtctggaactcaaatggatatgtcgaatttaatttgtaatatactggattctgatcgtgtttactaatctaatttgtaatatgctttgttttcatgattttacagaaatggaatcttcaagtagtatattgaagggggagatagattttatgagtttaaggattggttttctgttgattgttactggaaaggtgatataaattttaagcaaattatttcatcctttttgtctggaactcaaatggatatgtcgaagaaaagtgtatgtgggaaatttctttagttggatgaagttagtcactctgagaagttgactcattgtatgttgctgtctcaacttttctacaaggataaaagcaaaatgattttaaagtttttgggcatgatatagcatttacagaagaggatttgtaacgacccgactagtcgttttgagctctagcgcgtcgttcggtggtttgagtccttgattaacttcacttaaggtattatgacttgtacatatgatcggaactgaatttcgagaagttcggagttgatttggaaataaaattctcatttcggaagctttaagttggaagaattgattaaggtttaatttttgagtaaacaacctcggagtcaggatttgaaggttccaaaggtttgtatgataattttggactttgacgtatgttttgatcggtttttcgatgacctgggagcgttttggcgcatatcgtggaaagttgatactttggaagaatttcatgaatttgggttgaagtgtatttcaatattatcgatgtccgtttgggattccgagcctaggaatagctccgtatggtgattccggtcttgggagcgcgtccggatgtggatttggaggtccgtaggtcatttcggggtcatttggcgaaaattagaaacttgaaggtttgtgggtttgaccgggagtggactttttgatatcttgttcggatttcgattttgaaagctggagtaggtccgtaatatcaaatgtgacttgcgtgcaaaatttgaggtcaatcagactttatttgatagatttcgcgatcgaaggtagaagttggaatttttttagtttcattaggcttgaattggggtgtgaatcgtgtttttagcgatgtttgatgtgatttgaggtcttgaataagttcgtatgatgttttaggactcgttggtatatttggttggggtccctgggggcctcgactgtgtttcaggtgtgtttcagatatttttgggctactttggatgctcattttctgatgtctggtgttgttcttcacgttcgtgaggatcctcttgcgtccgcgaagaaggatttggcttctgggattttgttcatcgcgttcgcgaagattctctcgcgtcctcgaagaagaaaatctctgtttcacaggtctgacttcgtaggctcatatctcgcaatctgtaagaaatttggagatgatctaaaaacgaaagttgtaaccctttgtttttataaaagtaaaccatttatcatttggatttgtgtacaaaacgttatggctggtacactacaagctacccgagaagatgaagaagaaatttgtgctgcacaggactaactttggaagcttgtatctcaaaatttataaggaagtgggagataatgaaaacataaaagttgtagatcgtggtgtctagttttcagaaaattaaaccatttgtcatttggaaatttgtacaaaaagatatagccattatactagaggttgtcggagaagagtttggaaatgacttttgaaagttttgttcatcgcgaacgcgaagaagggttggttgggcagtgtataagtttgcaaaaataggtttggatcattccatctcatttcctccatgggagccaacaaaagagagatttggagctccatcttcatcatccatgtcaaggtaagtgattcccacatattgcaagttaaatacttggattatatacagattttaccatggaaattcacggaaaattaggtgaaatttgggggtttggtagaaaatctagaaatcggtatttttgtattttgaccaagaatttgggcatggaattgagcataaattatatatttgagttcgtgtctttatgggtaatgtttatctttgaaattttttgaaacccgggcacgtagcccctagggttgattttatcgacattttgagcgaagttggaaattattgtaaattggattatgataagtattagagtatatatttatggatttgcacatttattgactagttttggagcgctgggcatcggtttgagttgttggaaaggcttgggagccggctatggaactttagagcgaggtaagtctcttttctaaccttgtaagagggaattaaccccataggtgaattgagttaatatgtacttctattcatgggggctacgtatgcacaaggtaacgagagtccgtacgtagctagtaattatgcctatgtccgggtaattttaggtttacaccacgcctttttgataccgttactttattatgtttattattttccttgaggattcggagacttgaaagttttcatttgaaattcgtattttttaaaaagaattgaagaatattataataacttaagaaattatgtgcaaacgcgttgctaatatttccgcgagcggggtaaatttccactactcacatgggagcgggtcgttcgcctcgacagcttaatagatgcatctatagttcgtgtccttcgaccctcggcattgtgcaatttatatttttatgttggatcgggctgtacgacctcgacatgacttgcacatgataactctttggaactaataataattgactgtcacgacccgaatttccctctgttgggtaccgtgatggcacctagtcttagggactatgtaagcctaacatttacagaacattaacaataataaaggaaatctaacagtctcgatatagaaatcttgacagaatttacaatatcccaaaaccggtaatacaagtcataagctctacgaatttattctaaaatctctaattaccactgttcggaatgaatacaacagggtatgaataataaatacaaaaagaaggtgacttcgaagcctgcgagcgcaacaacaggttaccttgagtctcctcgtcaataatccgcgcaactaataacaataattacctggatctgcacacaaaaatgcgcagaagtgtagtatgagcacgccacagcggtgcccagtaagtatcaagactagcctcggtgaagtagtgacgaggactagtcaagacaccactggtctaataaattaaactgatatgaatatagaaataaccgaacacaacatctattttagacttcacattataattaacaacaatgacaatataatgtggaaggaaattacagaaattaactcaacggaacaacataataatacacagaaggatggacagcaaaacaagccaaaccggaagaaagccacaacacaatagaaaatactagtaactcaactttgcgtcagtttgctcacatcgggccttagccaataaactcaataaaatggtagaaacttttaaacaacatttcatattgaaaactttgaaaatataatcattttagtatagaaagatctcctttgaaacatactttctctaaatgaatatatatatatatatatatatatatatatatatatatatatatatatatatatatatatatatatatatatatatatatatatatatatatatatatatatatatatatatatatatatatatatatatatatatatatatatatatatatatatatatatatatggatttttagaaagagaaatctttaaaacatagtttctttcaaactacgtaattatcaaatatacttccccaataaatgacttacaaatatcattttctgcaagacaaatgcttttcaaatataccttcgaaataaaaaattcttgagacataatcttcttcaaggcaaatactttttcaataaaatctttcgatcataatctcctcaagataaatctaccggaactcaatacgtaactcagaacttgtcatgcagtacagggggaaagctcccggaatacgtccgtagtcccaattaaaatatgcaatgaagtacagggggaaagctcccgaaatacgtatgtagtcccaatttaaatatgcgatgcagtacatgggggaaagctcccggaatacgtccgtagtcccaatttaaaaatgcaatgcagtgcaactgagagaataactagaacaccacaaaaacaacgtacactgccacaacgagcacataatcaacaagacagaaattccaaatgcaacgggcagaccaacacaaggatttaaatcacgagaatggtaaaactcactcgtaagaggtagccactaaaggaaatgccaagcacaaagaggaacagagtaacgaggggaaaacaaggcaattttagcaatgattctaaatatttgttcacaacaaaagaaaccaaatcatccggcaagggaagcaactataaccaatctcacttaaacaattagcttcaccgaataacctcagcttgaacaatgctcagtaataaacaacaccaaggcaatactgtcaacaagcacggttatcaactaaacctaagtagcacttaagggaaaaatactgtaaaccacaatgtacgactcacaggcatgcttgacaccaacgtatagatattccatttactgctcaacaactatagggagatattgggctagttctagtcaaataggcagtttatgaaggaagatatagcacgacggtaggaaaaataaagtattcattcaagtcaattaagatcaaacaagaaacaaggaacactaagcaaataattcctaatttgaacaggaagaagtgaaactagcaatcaaggactcaaatttaacaattacaatttatacacaggtaatataaggacctatgaatcctaaaaggccaacctgtttgcaaataagtccgagtacgcactcgtcacctcgcatacacggctacaatcaacatagaagactcaatcctaaggggtagttcccccacacaaggttaggcaagatacttacctcaaagacgacaacccggtactccaaaatgaagttctcaagcgaaaaacctctggacgactcaaaatcaactaaaacaacttcgaaatacacacaaaatgtataaggaactatttcgaataataaagtttcaatctttacaaaattataaaaatggacccaaaagtcgacccccgggcccgcaccttggagcccgtcaaattatataaaatccgaatactcattccgatacgagttcaaccatacaaaatctatctaattccgatatcatttggtccctcaaatcatgatttttcattttagaaattttcctttcaaaccccacattttcctcaacccaaaacacaaattaaatgataaaaacaaggactaattcatggaatacatttaattctagttgaagaacacttacccattagatttgtgtgaaaacccctcaaagaatcaccaaaaaccgagctctagaagtcaaaatatgagaaaaatggtgaaacccctgattttgaaaacttatattcttcccaatgttttttgcatcgcgatcgtggaatatgagatgcgatcgcgtagaaggaaatggctgccggtcaaatatgtgctacgcggtcgcggtatagcttttgcgatcgcgtagaaggaaatggttgttggtcaaatatgtgctacgcgatcatggtatagcttatgcgatcgcatataaggaataggctaacttcttcaatcttgaagggatttatgcgaacgcggagagtaacgggtaccagtgcctaaggcctggtttctactatgcgaacgcgtagcatagaatgcgaacgcgatgaggaaggctatggagacacgcgatcgcgtgggcatttacgtgaacgcgaagaaggaatttgaggtgaccagcaaagacacatcgcgatcgcgaaagaagcactgcaattgtgatgaaggacttcaatcaccagaagacaacaattcaaacttggaagaaatggcccgtagcccatctgaaacacacccgaggcccccaggaccccgtctaatcacatcgaaaagtcatataacctcacacggactctctcaaggtttcaaatcacataaaacaacaccaaaacaacaaatcaaaccaaataccaaacttatgaattctcaaatcttcaaatatcaaaacttgagttgaaacatatcaaatcaacccggaatgacatgaaattttgcagacaagtcaaaaataacacaacggacttacaaccactctcgaaattccatttcgagcccgatatccaaaaatatcacctatcagccgaaatcgccgaaattctaactttcgccaaattacctcaaattactctacggacctccaaaatcaatttcggacgtgcgcctaaatcccaaatcatcatacgaagctgctgacatcacccaaaactcattccaaggccgtttacacaaaagtcaaacctccgatcaacttccatcacttaagcttctaaaaattgaaatttgcctcccaatttgactatggagtatccggtaactgtatccaaccacgcacacaggttgatatacctattgtgaagcttttcatgaccttatgccaccgaatggagtttaaactctcaaaacgaccgatcggatcgacacattgacattgctttattagcttgggatataaattgttaaatgatgaaaaatgaatttgggaatttctattagtaaagataattgttgattattttttattattggattttcagctatgttatgtattccatgcttaaacataatatcgatattttattgttagcctatgtaagtatcggagtctacccctcgtgtaaggacccgaccggtcgttttgagaatttaagctccgttcagtggcgtaaggtcatgaacaacttcacattgagtatatcgacttccgtgcatggttggattcagttaccggatggtccggagttgaaatggaagagggatcctaattttggaagcttaagtggtgagatttgaccagaggtttgacttttatgtaaacggcctcagaatgagttttggataatgtcaacagcttcatatggtaattttaaacttaggcacgtgtccgtaagtggttttggaggtttgtagagtaatttgaggtaattcggcgaaagttggaaagttgaaggttggaaaatagaagaaactttaccactgttgatgttttgggatatcggggtcagaatgcaattatgagagtttgagtagcttcaggatgttaattgggacttgtctgcaaaattttgcgtcattccaggttgaattgataggtttcggcacgagtttagaaatttgaagacttgaaagttcataagttcgatttatggtgtgattcatagttcgtcgtgttttaatgtgatttgatacctcagcgggtctgtgttaggttatatgacttgttaatatgttcggacagggtcccagcggccccgggtgtgttacggacgaggctcagatgttttgcatagttgtaaacaggtctggttttggtgttttcgcacctgcgaccttggagagcaggtgtggctccgcttctgtgtgagcccggtcgcttatgtgatcctggaggccttggatctagcccgcttctgcggaagttggcacgcaggtgcgatggccgcttctgcggtcctttgttcacatctgcgaggaatctcgctcctgtgattccacttctcgcttctgtggtgccgctgatgctgctgtataaccgcagatgcggtcccaggccaagtagccaaagttcgcagatgcggactccttctcgcaaatgcggtcccgcatatgtagtgtcttgaccgcagatgcggaagtcatggcagaatctttttatatcgagggttagccattttcttcacattttgaggtttaaacttcggatttgggagcttcttttgagggttttcaagcaattcgaatgggtaagtgtttctgacctagaatctaacatattccatgattttatcttcatttttgtcatttaatttgtgttttgggtttaggaaaatgttgggtttgaaagaaattttctaaaatgagaaatcgtgatttgatggaccaaatggtatcgaaatttgataaattttgtatggttgaaatcgtatcggaatgggtattcggattttgtaaaatttgacgggttccgaggtgcgggcccgggggtcgacttttgggtcgattttttgattcttgtaaagatcaaaactttataattcagaatagttccttatacgatttatgagtgttttgaagttgttctaattgtatttgatccacccgagaagtccattttatagtaccgggttgtcatcttcaaggtaagtatcttgcctaaccttgtgtgggggaactacccccgtgtacgcgaggtgacgagtgcgtactcggacttgtttgtatgaagccttttagagttcttaggtcattatattccccgtatatgaagttgtaacgattatgacttagttcctgattgctagttttatctcttattgcttaaattaaaattacttgcttttagattttcctttgttgtctatttgatcttaattggcttaattgaagaattttcctctcttatcatcatgctatatttttattcataaactagctatttaatcaaaattagtaatatctcgccttataattgtttagcggtaattggagttaggatggtctttatctacttacccttatttggattgtgaaatatctctcatagctattcaaccttaaaaagaaaatttagataacctaccccttaatcgactggatcgtacttggaatctcttgacttgtgatgacatcttattgtggacttgaatattgtaattcgttgttacgtcgtgtttctccctagttaagcttctttctttacgcttattatttcctttcagtggttattccttgtgattgagttctatcgtttcgtgatttaagttcttgtattgatttgctcgtcgtacattgcatttctatcttttgttgcttattggttgtggtggcaatgtacaatgtttctgtcatgttatggttgttatctccgttgattgcattgcatatttaaattggggactacgaacgtattccagttgatccccatgtaccgcatatttactttgggaactacaaacgtattctgggagcccccccccccccctcccaacacgacatatttacttttggggactacagacgtattctaggagatccccccagcactgcatatttatttttggggactacggacgtattgtgggatatcccccaacactgcatatttacttttggggactacaaacgtattctaggagatcccccatgtactgtatgtccaattctgtactacggacggagtttcggtagatttatcttgaagaaattatgatcgaaagatatttattgaaaagtgtagctgaaaagcatttgccttgaaggaaactatgtttgaaagactgttatttcgaaaggtatatttgaaaagcatttatcttgcagaaaactatgtttgaaagaattttattggaaaagtatatttgaaaagcatttatcttgaaggaattacgtttgaaggttatttttctgaagtatatattcggaggaagtatatttcaagggaattttctatttgaaatgattatattttaaagctttcaatataaacttgcgggtggaagtctacactcgaagctttgaccaattatttggggttgttagataaaggcctgatgtgaaaaactattgcaatgctgaattactactcattcttaacgtattgtggttttcgattttcggattgtgttcccatccattcttctgtgtattattatgatgtttccgttgttgtttgctgtattttcctttcgtttcatacttattatgtgttaactacattgggtagtcattagatagatgtcatattctgctattcctataattatgcatgtttagttttattagaccagtgggtgtcctgactagttttcgtcactacttcgccgaggttagtcttgatacttactgggcactgctgtggtgtctcattctacacttctgcacattttgtgcagattctaggttttgcatagtggaccgatcgatagatagcagtgcggttgctgttgtggagactcaaggtaaaccgctacagcgttcgtgggtttcagagtcactgtcttatatttttgtcatacactgtttcattcattccaaacagtggcaactggaaatcttagtgtaaattccttaaagcttatgacttgtattcgccgggttttgggaagatgttcaatgtatagaaagttatgtcaaaaatcttttaaaaagttttgatattatgatttatgtttactcactgttaggcttacctagtccttaagactaggtgccgtcacgatacccaacagagggaaatttgggtcactacttctttgaagttagactggatacttactgggtacgcgttgatttacttacttatactacacttgctgcacatttttgagcaggtgcatatatgtctagtggccttgtgggcgcggtggatacggtgtgatgacccaaaaggtcatcctatgtaaatttagcaaacaaactgtgttccgaggccgaaagcctccgttaatctcacctcgatgtgcgtagccgggaagcttttatatggaaacttgataaagagttgaatttataacaattagttgattaaagttgactttggtcaacatttttgataaacggacccggacccgtgatttgacagtaccggagggttcgtaggaaaatatgggacttgggcgtatgcccgtaatcgaattccgaggacccaagtccgagaaatgaatttttaaagaaagttgttttctaaaaataataaaggcttatgaaaatgatcctcgatgtgaaacctgtgttgccgggcccgtatcatggttccggagcccggaacaggttcaatgtgtgttatttaagttatctgtgaaatttggtaaggaacgaacttgatttgacgggtttcggataaaaaatgggaaattgagagttattcaagttttgaggattttcatagaattttaaatttggtttggaacgtgattttaggttatcgaggtctgaatgtgattccgagaccgggaatagttccattgtgtcacttatggcttgtctgcaaaatttgatgtcattccgagtcgtaaaggtcggtccgacgcatgtttatagaaatcaagagcttgaagtttcttaagttatggttttaggggttttggagtgtgattttgagctttagcgttgttttgagtgttccgtgggctcgagcaagtccgtataatgatttgggacttgttggtatttttggacgggggatcgggtgggcccaagtgtctcccggacccccaacggggctaaaaatcagctaaaacaacagctggtgcaattgttgctggtatgaccgcaggtgcggttgcccagctacaggtgcgggaccgctcctgcggtcccaacctcgcaggtgcgggtttttttcggcaggtgcggcccccaactccgcaggtgcgaacccagctcccccggctgtttttcgcaggtgcggccatttctttgcaggtgcaggaccacatgtgcggtcccagggtcgcaggtgcggaaacccctgtaggcagcctgtatttaagtgtcaaaactcggttttccttcatttacatccatttcaacctccattgaagggtcctaagagcttgagaaaccattcctcgacccacttccagtagaggtaagtaatttcactctattttttactagtttaattcatgaattctcaaggggattaactactaaatcttagaaatatctaggttttaagtagtagatgggatttttgggaatttgatgaactatccaattaatgctatgaattcacgtagaaacttcatattaatgatccttaggctatgggtgagtgattcctccgagaattatcgggattcgagcatgcaggcccggggttgaattttagtatttttggaagaatagtagaaaatgtataattaggctttggaattggtttattgagtaattattgatgttaataaatccattatgtctagatattatcgattcggagttggattcgagaggaaagactgtgattgaggcttgacttgcattttggagccgaggtaagtttggcctaaccttagcttgagagaatatgtatagagtcttatttgctatgtgtaattcatgtcctacatataagttaggtgacgggttcctatatgttgtggtcaagcatgcccgtaggtcaaacgtgatgaatcataccgtgttcttaatattctctgtattatgagtaattggtgatttagaagtgatactgtaacgacccagccggtcgttttgtgtgttgggactctgttcctatgaatgactctttccatagcgactactcgtgccttatgacttgtgtgggcaggtagctcgagattcagaagtaatttggccagttcaggaacacttggttcttgaagcctatttggctaattttggtttcgagcagcattttgagcaaacgacctcggaattgagttctgacagctccagcagctccggatgatgatttcggactcgggagtgtgttcgcctcgggtttttgatgacccaggagtatttcggctcctgaattggaatttaggatttcataagatttggaattcagcctggaattggacctcgtgatatcttggtccgaatggaattccggaactggcaatagtttcgtattgtcatttatgacttgtccgcaaaatatggggtcattccgagcagtatagacccgttcggcgtattggcgagccattgaaattttcttgaaatcctaagtttgaactaaggggttttggagggtgatttctagtttggatgatgtttttagtgttctgggagctcgagcgagtccgtcatgtgatttgggacttgttggtataatctgtcgagggctcgggtgggcccaggggtctcccggaccccgatcggggtcaaaaaccagcaaaactcatagctggtgggaatttactggtgtgaccgcacctgcggtccatgagccgcaggcgcgaggttcgcaccagcggccatctcatcgcaggcgcggctccaaccgcaggggcgactcctcttctcgcaggcgcagctccgtaggagtggaccaggctccgaaggtgcgacccatccccaaggcccatgccatcgcaggcgcggccaatttcctgcaggtgcgagaatttcccccagtgcctaggcctttttccgcaggtgcgagtccgcacttgcgatccaaaggtcgcaggtgcggaaactgctaggcagtcctataaaaagcccaagtcgtgaattcttttcccaaaaatcatatttcctccattgttgacgaccccaagagctccagaacgggtatttcgacctagaaactcaggtaagtgattccctaaccctccgcatgttaatttcttcaattccttgggaatttcctcttccgaatccatagaattcataagaaattgtggggggaagaaagatgggtttgattaaaatgtgaattctgatttttgggccattgagggatgattaattgagttaatcttgatccttaggcgacgtatagcgcgtttcttcaagaattataatttttcagacgccgaggctcgaagttgaatttccaaagtacgtcaagaatacgtttttaaggaaatatttgataaatcctcctcgaatcttcctaaattgatataattatgtgttttttgctagttgcgagccatcgagggtaattcggaggattcgtgcgtcttgttgattggtccgttggccggaggagcacttgtccaggtgagtctcctttccaaactttgtaagggggaaatgtcccctaggctcttgattgctaattgtgcttggtgagggggctacgtacgtaccacgtgacgagagtccgtatgtggcatctatattgtacatcgggtagccgtaggacccacgagcatgttctaactgtttgtttgatattgtctgatgttttgtacgagttattactgatatttgatgaaattgagctatgatagctgcgaattaaatgtacataatattcagataagaattatgaacttcatcaatggagtaattgtgttactcctggtataattgataaagagcaaagagtaaatgagataatgagctgttgagctagatgaaggtggttaaaattctttcttatacttgaataatgaaataagtcttgataatgagctgttgagctaaataaaggtggttaaaattccttctcgtacttgaattgttcaatcatggtaatattatgagcaaagaggataatatatacacacatattgagtgtgggcgagtcggtaccacggtgtctacatatacacacatatatatgcattcatgcagtcgcatacacgcattcatgcattcatggcccccgagtcataggtttgattcgtgatcggggagaacttatattttcattgcccctgagtcacaggtttgattcgtgatcaaggaggaatttcacttatattttactagcccctgagtcacaggtttgattcgtgatcagggaggaatttcactcatatttttactagcccctgaatcacaggtttgatacgtgatcagggagagatcagacttattttacttgcccttgagtcacaggtttgattcgtgatcaaggagaattatactactattttcattggcccccgagtcacatgcatgatttgtgatcggggagagttttactttgcatagtcagcacacgagtcgcaggtatgattcgcgatcgtggggagcttatcattatcgagtcagcacacgagtcacatgtatgattcgcgatcgtcgggagcttatcattatcgagtcaacacacgagtcgcaggtatgatttgcgatcgtggggagcttatcacagcgcacgggtcacatgtatgattcacgaatgtgtggagctttatgatcgagtcagtccttatgacccacccttatgacttcggccgatagacttgtccgtgtcggttatatatatatatatatatacgcattgcattcatccgcatttgcattgagttgggatcatacgagggtgagttgagaaacaatacagagtactgggaagtgatcaattgagaataaagataagacctttcggataatgagaaagagaacaagtaatataactatgaataacttacaaaggaagactatgtttgagatcagttactgattgttgcttacatgttcttatacttgatttactttctcatatgatttatttctcagcatgtattttattttattatgtactggaccttagtaagtatgtattctacctctcgtcactactctttacgagtttagacgggatactcactgcttacatatgtgattatatgtactcatgctgcactttctttctttttctgcacttgactgtgcaggtattgaggctggttcgtctgttcgtccgtcagctgataggtactgatcgcggtgtcgctccacacggtgagctgtcttcttggcgttttcctgacagcacctctggagccttctagtttcattttgctcagtcttttgttccagactgcggcttctatattttgtatatgtatttctgctgttgtatctatgtagccgcctgttgacactgtgacactagtcctggcacacacttgttgtagttatcggggttgtatatatattgggcctagttgtggttcagcttgtttctacggccttaccccatattgttattgtattccgcacttttattgttaaagttgttgttcgttggcttgcctaacctcgccgttaggtgccatcacgacctggaccggttttgggtcgtgacagataccttgatgatgtttcacgacatggggagttattgtgttatttgtttcagttgaggcttttactgttgaaactgtatttctgatgcgaggttggttatagctgaatcccttaccgggacgacagaattttattgagcatttccttgcacttgagatttctcattgttgatgttcacattatattgttgcttttatattatttatcgcacgaggggacatgtcgtgctgattgtttattatttatcacacgaggggacatgctgtgttgatcgttattatttatcacacgaggggacatgccgtgttgatcgtttattatttatcgcacgaggggacatgccgtgctgattttttattatttatcacacgagggaaatgccgtgttgatcgtttattatttattgcacgaggggacatgccgtgtcgagtgttactatatatgcacgaggggacattccgtgccgagtgattgcgagattatgcacgaggggacatgccgtgccttttgctgttcattatctgtgttgatgacgttaaattgttgcttttacctttttacatttcagttattaccatgttctaccgtgctagcattttgttgccccttttacccccagcatgttctccccgtatctgtttttactcgcttatttccgtcgatatttttgtgttattatatagaattgcataggtacatatactgtcgtcggtcctagcctcgtcactacttcgccgaggttaggctcggcacttactcagtacatggggtcagttttactgatgctacacctacacttctttatgatgtgcagactacgcagccggacccggtggtcactgacggtcggagcatttcatcagttcatacaggagacatcaaggtagacccgcagacgttcgtgggccttggcatcaccttctacccttcacttttagctctgtctcatcttatagtgacctttgtatttagtgatctcttagacagttcgtgagtatgtgacaccagttctgggatatgtatatgggttttatctcgaagttgctatattatttgtggtaatttgttaaccttcatattgttgaccatcgatgccttagttatcttgtttgttttagttgttaatgagttttatttagttcaacgttggcttgtctagcgggtttgacgttagacgcagtcatggcccgaaggtgggatttcgggtcgtgacaagttggtatcagagcccgaggtttcttaggtttcacagctcacgaacaaacttggtagagtctaagagatcggtacagagacgtatgtacttatctcctagaggctgcaaagttaggaataacttcatatctttcattctctgtcgtgccatttaaattctaaatactaattgagtttgtatcctactctcttgcagatggcgaggacacgtgcttcctcatcgaccgatcggcagcctgatcctcctattgcagctcctacgaggggtcgaggcagaggccgcactaaaggccaaggcagagctagagcaacagctccaattgaggacccacatgtagactttgacggtgaggttcctactcagacaatcacagttggaccaactcaggtcccagaggggttcattgctaccccggtgcttcaggacgctctagtccacttggtgggacttatggagagtgtggctcaagccggttttcttcctactgcaccagctattctcaagctgggggagggacctagactcctgtaattcataccccagagcaggttgccactcagtttcagactccagcacctcaaacagctgaagtagctcagtcgggtattgtggcaccggcaactgagggtgcaactatgtcagcagatgccctatggagactagatcggttcaccaagttattcactactacatttgctggtgcactatcagaggatccccaggattatttagacatctgttatgaggttcttcggaacatgggcgttgtggagtccaatggagttgactttgctactttttggttgtctggcgcacccaagacttggtggagagactatttcctgaccagaccagctgggtctgcacctttgacttgggatcagttctccgagttattctttgggaagtttcttcccattactcagcgagaggatcttcaaaggcagtttgagcgcctccagcatgggtctatgtctgtcactcagtatgagaccaggttcatcactctagccaggcatgcacttatgatacttcccactgattgggagagggttcagagatttattgagagtttggcccagcctatcagacttcagatggccagggagacgggtactgatatctcctttcaggatgcagccgatatggccagacgcattgggatggtattatcccagggtggtggttagggatctgacaagagacctcgtcatttcggccgtttcagtggtgcctcattttgaggcagagattcatttagtataggtcatccacctaggccttatcagtcagcactccaggcatcccgcaatgtatcatcatcccccatcagtgcaccgccgattcagagtcttcaaggtagttattctggtcgtcagggacagttccagggttagtattttcagcagccgagggcttgctacacttgcggtggtatggggcatatttccagtttttgccctcgaggttttgctggttctcagtatcaaggttcccgtaccatggttctcgcatcaggtgcaccctcgcccccttagccatctaagggtggtcgtggtgccagaggtggaggtcagactcatagaggtggagggaaggtcatgagaggtaggggtcatcccgtaggaggtagacctagagatgttcaagttggaggggctctgccccgttgctatgctattccggccaggcctgaggctgaggcttctgacgcagttatcacatgtacggtatccgtttgcagccgatatgcttcggtgttattcgatccggtactttctcttatgtgtcttcatattttgccccttatttgagcatgccccgtgattccctgagtgctcctgtatatgtgtcaaccccggtgggtgattctatggtggtagatcgagtctaccgtgcttgcttagtagttattggtgtgatggagactcagcttgatcttttattcctgtatatggtggactttgatgttatattggggatggattggctatctccctatcacgctattctggactgtcatgccaagacagtgaccttggccttgccaggtgtgcctcgtttggagtggagagggactcctagccattcttctggtagagttatttcttatatgaaggctcgacgtatggtcgagaagggttgtttggcctatttggcctacgttcgtgattctagtgctgaggttccttctatggagtctatgcttgtggtgagtgagttcccagaggttttccctgctgacctgccgggtatgccacccgacagggatatattgacttttgtatcgaggtggctcagggcactcagcccatttctattctgccatatcgtatggccccgccagagttgaaggaattgaaggatcagttgcaggacttgttggataaaggcttcattaggcctagtgcttagtagcatgcatgactcggagggtcttgtacatttcgttgataaaatcctgagaatcagcctcagggtcagtacctatgaactctggaggggctaactgaagaaaccggttgaccctggaacctgaagaatccccttgctcactagaggatgcatgggaaatattatctctgggcctgagaggccaccaactgcgtcaacatctgaatagctcccctgaggtcctcatcagaaataccgggatcagaagctggggctggggtacgatcaagaacatcagcgggagggatcgtagcaccctctgccagagcaggaattggaatagtttggcctggaatggaagagtcaggcagattcatagtcagggaattgtcctcaccgcaccatcatattgataatttatggccacacttggggtggcatcggcctctaggccgagccgagacttcttcttgggtgccctttactgaaagttcaaacaatgaacgagttagagagaaacaacctcacctttcactccatcgcacgatacagaataacaatgaagagtagtattcctaaaatgtccatgcaaccccctaattatagatgtggtcgacaacacatggataagaaggtctatactagacaaggctccaagacatcctaggacacttttaaaaccttaggctctgataccaaatttgtgacgccccaaaaccgagggacgataccatcacctaatcgagtgaacccgatcaaacaaggctgattaacctttcctacctgaatcgtttcacccccgcgttatagcatacattaattacatgagttagcaagagacaaatcaaaagcatagtttcataacattaagcccattttccacttttaccgttatgaactttaggtcttccaaaacatacatacaagttacaatgttcaaggtacggaatcgcaattatgagtaagttcaacactacccaaaatatatatatatatatatacaacccacatagtgtctacggagcctctaagaatttggagaaatatacatagacctgccggcgacaaggccctgactatacctcaaaacggaacatgtacaaaagagggagcaatatatatatatatatatatcatcatcatatgtccccagatggaagtggggctcgccaaaactgctggaagggaggaggagaaagcaccactatcgacgatcgacgctacctgctacagaaccacctacatccatataaaagatgtagcgcccccgacaaaagggatattagtaccattgaatagtactagtatgtatgaacaaactctactctagatgataagcagtaaatatgcaatgatgcaaatagagacttcacataacaattcacacaatcaagagtcaccctgtccttatcccattttgccatcttttggttaatgttcttttaagttcctcttattattattattattattactgaaccaccgtgtcgttgtcacacgaagtccggtctctgcccgaccagctaagccatcctaggtgatgcctaaataatcatcacatcttatatcaccaccgtggcatgttcgcacggagtccggtccctgcccgaccagctaggccatctcaactgaaacagtgaggctaaaatcaacatcatatcacattttcatgtctccatgtgtacgacatggagtccgatcccgacccgatcggatatgccatctcaccctaggacattccctgtcgattcatggatcttttagttcacttttagcattttccgtcttttgattcatctttcatatcattacaatcctttggttcatgtttcatgtcaatctaatcctttgattcatatttcatatcaatttaatcccttgattcatatttcacctcattacaatcctttgattcatgtttcatatcattccaatctttcacatctaccacacccatcacataggaagatcgcgcacatagtaaaggcaatctgtccaactatgcgaccactatgcagtctacaaacgtgatatgcgatcgcagatccgcacacacctggaaaaaattctaccctctaagtcctgggtacttttcactccaaaagggtccgatttaagaattactacagttatatcaacaggggacctacccgggcatcatttttagttaagaaattttatggttctttacactctcaaaacgatcgaccgggtcattacattctccccctcttaagaagatcgttggtcctcgaacgagtatagagacatagctaaagttgtgaaaagatgagggtactgactgcacatatcttgctcggtctcccaagtagcctcctcgaccggctgagctttctgacctgcctatctaatatagctacaggctcctcaacacatgatagatccttgtccaactggactgaactgaaatccaaaacatgggtcgggtcatcgtgatacctctggagtatagtgacatggaataccagatgaactcctgctaggttgggaggcaaggccagctcataagcaacctccccaacccgctgcaatacctcaaaagggccaataaacctcggacttagctaacccttcttcccgaaccttatgacacccttcataggcgatacccgaagcaaaacccgatcaccagccataaatggccaaatctcgaaccttcccgtccgcataactcttctgccttgattgagccgtgcggagcctctcctaaatcaccttcaccttgtctagggcatcctggaccaaatttgtacccaacaatcgggcctcgcccggctcaaaccatcccactggagacctgcattgtctaccatacaaagcctcatatggtgccatctgaatgctggactcgtaactattattataagcaaaatctgcaagtggcaagtatcggtcccctaaccctccaaaatccatcccacagggcgaagcatatcctcaagaatctgaatcgtgcgctcgaatttcccgtccgtctgagggtgaagggttgtactcaactccaccctggtgcctaactcctgctgaacgtctctctagaaccttgaagtgaactgtgtacctctgtctaaaatgatagatactggaataccgaggaggcgaacaatctccctgatataaatctcaaccaacctctcgaaggaatatattgtcaacactgtaatgaaatgggctgatttggtcagccgatccacgatcagccaaatagcatcgaactttctcaaagtccgaggaagtccaaccacaaagtccatggtgatccgctcccacttccactctggaagctcaatctgctgaagtaaccctcctggtctctaatgctcatatttgacttgctggcagttgagacacttggccacaaactccactatatccttcttcatctttctccaccaatagtgttgtctcaggtcctggtacatcttcgcggtaccatgaatagaataccgcgagctatgggcctcctcaagaatcaactcccgaagcgcatctacattgggcacacagatacgaccatgcatcctcatcacaccatcgtcacctatagtcacatccctggaatcaccccgccgaaccctatcctgcagaaccagaaggttgggatcatcatactagcgctctcgaatgcggtcataaagagaagaccgatcaaccacacaagctaaaactcggcaaggctcagaaagattcaatctcacgagctgactagctaaggactgaacatccaagtctaagggcctcccaactaccagaagatatgccaaactccctaaactcttcgcccggcgactcaaggcatcggccaccatattggccttccccgagtggtataatatagtgatgtcataatccttgagtaactccaaccacctacgctggcacaaattgaggtccttctgcttgaacaagtgctgcaaactccgttgatccgtgaaaatctcacagggaacaccgtacaaataatgacgccatatcttcagggcgtgaactatggcttctaactcgacgtcatgaactggatagttcttctcatgcaccttcaactgtctggacgcgtaggcaaccaccctaccgtcctgcatcaacaccaccccaaggccaatcctcgaagcatcacaatagactgactgtataggaccctgaacccgtaggcaatacaaacactggagctgtagtcagggctatctcgagcatctgaaagctctcctcacactcctcagtccatctgaacggagcatccttttgggtcaatttggtcataggtgctgcaatggatgaaaacccctctacaaaatggcgatagtacccagctaaaccaaggtaactgccgatctcagtagctgaagacggtctaggccaactctacaccgcctccaccttctttggatctaccttgatcccatcacaagacaccacatggactaagaatgcgacataatcaagccaaaattcacacttagaaaattttgcatacaatttcttctccctcaaagtctaaaggacgatcctcaaatgctgctcatgatcctcctaggatcgagaatataccaagatgttatcaatgaacacaatgacgaaagaatcaagataaggccgaaacacattgtgcatcaaatgcataaaggctgttgggggcattggtcagcccaaatgacatgacgcgaaacttagtggccatatttggtcctgaaggtagtcttcgggatatccggctcctgaatcttcaactgatgatatccagaacgcaagtcatgcttggaaaataccctggcaccctgtaactggtcaaacaaatcatcaatgcgaggcaaagggtacctgttcttgactgtaaccttattcagctgccggtaatcaatacacatacgcatatagccatcctttttcttcacaaataatatcagagcaccctaaggtgatacattgggcctaatgaaacccttatcaagcaaatcctgcaactgctccatcaactcctttaactcaggaagagccatgcgatagggaggaatggaaatgggctgagtgcccagcaacaaatcaatgccgaaataaatatatctgtcgggcggcataccaggaagatcagctggaaaaacaacaggatagtcccgaacaattggaactgactcaacaataggggtatcaacactaacatctctcacataggctaagtacgcatcacatcatttcttcaccatccgctgagccttaagcaaagaaatgactctgcggggagtatactctaaggtacctctccactctaatctcggtaaacctggcatagccagcatcacggttttggcgtgacaatcaaaaatagcataatggggcgataaccagtccatgcccaagataacatcaaaatctaccatactgagtaataacatatcagccctggtctcaaacctactgataacaatcaaacacgaccagtatacgcggtccacaacaagagaatctcccacgggagtagaaacataaacgggggaactcaaagaatcccgagatatccccagatgtgaagcaaaataagaagacacatatgaatacgtagagcctgggtcaaataatactgatgcatccctatgacaaacagggacaatacatgtgatgacttaatccgaagatacgacctctaaatgtgctggaagagcatagtacctggcctggcctcccccacgagggcgatctcgacctccccgacctccacctcgaggtgtctgagcaagtggggcagtagctggggctggaagaatagctagaggacccagtggagcacgtggggcctgataagtctgagatgatgtacgcctcctagctctggggcagtctctgagcacgtggcgagggtcaccacacccaaaacaaccccttagaggacgtggtggctgatgctgactctgaactggcctgctagactggccggtgatagcacctcgagcaggaggcacactagatactggtggtgcataataaggctcatgaggtctaggaggagctggaataccactggctgctggaagagctgaatgacaaggcgactcaaaacccccctaccatagcgtgttgctggtgcacgaactcttgagtactgactagtctctcgagacctcttggcctctctctcctctctgtccccggccaacatgctctcaatcctccggtcaatactcactgcctgctggtaagtgatatttgtctccaaccctctggccatactggtccgaataccggggtggagtctctcaatgaagcgtcgaaccctctctctgatcgtggcaaccaaggccgatgcacgacgatccaagtcattgaaacggactgaatactccgacacagtcatagtaccctggtataactactcaaactctgcacgccaagcatccctgaggctctgaggaacaaagtcaagcaaaaacatctctgagaactgagaccaagtgagtgaagctgcctcatccggactactcagctcgtaggcatgccaccactgataagccgctccttcaactggaaagcggtgaaagaaaccccactcgtgggatgcttggcgtgcctatgagctatgggtattatggagacgagtggggtttctttcaccgctttccagttgaggggagcgacttattagtggtggcatgcctacgagatgagtagtccggatgaggcagcttcactcacttgggatcaattctcagagatgttttttcttgactttgttcctcagagcctcaggaatgcttcgcgtgctgagtttgagtagttatgccagggtactatgactgtgtcggagtattcagtttgtttcagtgacttggctcgtcatgcatcgaccttggttgccacgataagagagaggcttttacgcttcattgagggactccaccccagtattcgaactagtatggctagagagttggagacagatatcacttaccagcaggcaatgagtattgcccggaggattgagagcatgttggcccaggacagagagaagagaggccaagagatctcgagagactagtcagtactcaggagttcgtgcaccagtggcacgttatagtaggggttttgtgagtcgccctgtttattcagctcttccagcagcagtgatatttaagctcctcctagacctcaggagccttattatgcaccaccaccagtatctaatgtgccccctgtttgaggttctatcaccggccagtccagcaggacagttcagagtcagcaccaactaccacgtcctccgaggggctgttttgggtgtggtgaccctcgccacgtgctcgaagattgccccagagctcggaggggtgcatcatctcattcttatcaggccccacgtgccccactaggtcctccagttattcttccagccccagctactaccacatcctctcagacagctcgaggtggaggtcggagaggtcgaggtcgccctagagggggaggccaggccaggtattatgctcttccagcccgttgagaggacgtcgcttcagatttagtcatcacaggtattgtccctgtttgtcatagggatgcatccgtattatttggtccaggctctacgtagtcatttgtgtcttcttattttgcctcatatttagggatatctcgggattctttgagttcccccatttatgcttctactcccgtgggagattctcttgttgtggaccgcatatatcggtcatgtttgattgttatcagtggttttgagacccgagctgatttgttgttacttagtatggtggatttcgatgttatcttgggcatggactagttttcgccctattatgctattcttgattgtcatgccaagaccgtgacattggctatgccaggtttaccgagattagagtggagaggtaccttagagtatactcccagcagagtcatttctttccttaaggcccagcggatggttgagaaggggtgtgatgcgtacctaaccaatgtgaggtatgttagtgttgatacccctacagttgagtcagttccagttgtgagggactatacagatatttttccagctaatcttccaggtatgcttcccgacagagatattgatttcggcattgattagttgccgggcactcggcccatttctattcctccatatcgcatggctcctcctgagttgaaggagttgaaggagcagttgcaggagttgcttgataaggatttcatcaggcccattgtatcaccttggggtgctccggtattatttgtgaagaagaaggatggttctatgcgtatgtgtattagattatcggcagatgaacaaggttacaatgaagaacatgtaccctttgcctcgcattgatgatttgtttgaccagttacagggtgctagggtattttccaagattgtcttgcgttctgaatatcattagttgaagattcgggagccggatatcccaaagactaccttcaggaccagatatagacactatgagtttcttgtgtcatttgggctgaccaattcccccaacaacctttatgcatttgatgcacaatatgttccggccttatcttgattccttcgtcattgtgtttattgacgacatctcggtgtattcccggtcccaggaggatcatgagtagcatttgaggaccgtgcttcagactttgagggagaagaaattatatgcaaaattttctaagtgtgaattttggcttgattctgtggcattcttaggccatgtggtgtcttgtgatggtatcaaggtagacccgaagaaagtggaggcggtgtagagttggcctagaccgtcatcaactatcgagatctgcattttccttggtttggcaaggtactatcgccattttgtggagggatgttcatccattgcaacacctatgaccagattgacccagaagggtactccgttcaggtggacagaggagtgtgaggagagctttcagaagctcaagacagccctgactacagctccggtgttggtattgcctacgggttcagggtcctatacagtctattgtgatgcctcgaggattggccttggagcggtattgatgtaggatggtggggtgattgcctacgtgtacagacaactgaaggtgcatgagaagaactattcagttcattacctcgagttggcagcaattgttcacgccctgaagatatggcgtcattatttatacggtgttccctatgagattttcacggatcaccggagtttgcagcacttgttcaagcagaaggacctcaatttgcgctagcgaagatggttggagttactaaaggactatgacatcactatattataccaccagggaagtccaatgtggtggctgacaccttgagtcgccgggcggagagtttggggagtttggcatatcttccggcagttgagaggccctaagcattagatgtttagtccttagccagccagttcgtgagattgaatctctcagagccttgtcgagttttagcttgtgtggttgctcggtcttctctttatcgcattcgagagcgctagtatgatgacctccaccttctggttcttcaggatagggttcggcggggtgatgtcagagatgtgactattggtgatgatggcgtgatgaggatgcagggccgtatctgtgtgcccaatgtagatgggcttcgggagtagattcttgaggaggcccatagctcgcggtactcaattcatcccggtaccacaaagatgtaccaggacctgagacaacactattggtggagaaggatgaaaaatgatatagtttggagtttgtggcaaagtgtctcaactatcaacaagtcaaatatgagcatcagagaccaggagggttactacagcagattgagcttccagagtggaagtgggaacggataaccatggactttgtggttgagcttcctaggactttgagaaaattcgatgctatttgggtgatcgtggatcggctgaccaaatcagcccatttcattctagtgttgactacatagcctcctagaggttggcggagatttattgatgggagattgttcgcctccacggcattccagtatctatcatttgagacagaggtacacagttcacttcatggttctggagagtcgttcagcaagtgctaggcaccagggtagagttgagtacaacctttcaccctcagacggacaggcagtccgagcgcacgattcagtttcttgaggatatgctccatgcctgtgtgatggattttggagggtcatgggaccggtactttccacttgcagagtttgcttataacaatagctaccagtccaacattcatatggcgttgtatgaggctttatatggtagacggtgccggtctccagtgggacggtttgagccgggtaaggcctaattgttgggtacagatttggtccaggatgccctggaaaaggtgaaggtgattcaggagagacttcgcacaactcagtccaggcagaagagttatgtggaccggaaggttcgggatttggcatttatggttggtggtcggattttgctttgggtatcgcctatgaagggcgtcatgaggttcaggaagaagggtaagctgagtccgagattcattggtccttttgaggtattgcggcatgttgtggaggttacttatgagttagccttgcctcccaacctagtaggagttcatccggtattccacgtctctatgcttcggaagtatcacggtgacccgacccttgttttggatttcagttcagtccagttggacaaggatttatcatatgttgaggagccagtagctatattggatagacaagtcagaaagcttagataaaaaaatattgcatcagtcaaggttcattggaggggtcagccagtcgaggaggcgacttggaagaccgagcaggatatgcgcagtcagtaccctcatcttttcacagcttcaggtatgtctctatacttgttcgaggacgaacaatatttttaagagggggagaatgtaactactttccccatgtttatatctgcttacgggtcttgtcggaatgtttagttgcgaatttcggagagtttttggacacatagtccctatatatgagtttaagctttagaaattggaccgtagttggaactgtgtgaagatggatccggaatggaattcttcgactcagttagctccgttgggtgatttcggggttaggagcgtgtccggaatgtgttttcgaggtctatagtagatttaggcttgaattggcgaaagttaaaatttcggcgatttcggccaataggtaaaattttgatatcatgctcggaatggaattccgagagtggatgtaggtccgtagtgtcgtttatgacctgtgtgtaaaatttgaggtcattcggactagttttgacgtgtttcgacatcggttgtggattgtggaatattcataagttcttagcttgaatccatgcataattcttgatttttgtgttatgtgatgtgttttgaaggcttgactaagtttgaatgaggactggttggtaggtttggttgaggtcccgggggcctcgggtgtgtttcagatgctcaacgggcatttttagccttgtgtgtgattgttggttttctggtgtaaccgcagtaggtgtttgctcattgcgatcgcgtgtgaggatccgcaatcacatagtgtatattttgggcctaactgggttgtgcaatgcgatcgtctagtatgggccgcgatcgcgtaggcttgctgggtagggcagggggaaattgttcagtgcgttcgcgagaggtcgcctgcgaacgggtaggtctatcttcagcttgaatcgcgaacgtgtggaggcagggtcgcgtttgcataagtgtgtgaggtggcggtgtggcgcgttcgtttacgggatcacatgatgtgttcctggttcgcgtagcaattcttgagcgcgtgtgtttttactctacgcaatcgcacttgaaggttcgcgattgcactgtgtgttcacctgagcagatttttaaaaacccaaatcgagggtttaatccataattcatattttgaacttgggagctcgggaaagtgcaattttgagatattttcacctgggcaatttgggtaagttatttctactcgatttagactaatttccatgattatacacttaaatccatcctttagtttcgaacgtttggtgggaaattggggaaattttggataaagttcttaggccaagtttttgggttttgatcgagattttggtatctgattcgagtaattcttgtatggttagacttgtgagtgaatgggtgttcgaaatttgtaatttttacccgattccgagacatggacccgggggactttttgggcaatttttctaatttcgcgtattggccttgaactaattagctagatatatttcttaaagtgatatttacattatgcaattgaaattaatagaattcagagtcgggtactcgtggaaaggacgtggttttgagttgagtagagcagtcgaggtaagtggctttcctaactctgtgttggggacttccccttaggttgttttgacactatttgttgtatgggcgctgtttccgtgaggtgacgagtatgtacacgggccattgttgttaaaattccatttttcctttccatgccataaatcattttactcttatttcaatgtttaatgtgctatttgtgtagtttagattaggaaagagcatgtctacctgttttacctaaattctctatttgatactatgtgcaccatgtttagttagttttatccttttcttgcctatgactttccctgaactgtttaaataaaccttatccagctttcaattgcattgcatatttaaattgggactacggacgtattccggaagatccccctgtactgcatatttaaattgggactacagacgtattccaggagatccccctgtactgcatctttacatttggaactatgggacgatatcccgaaagattccactgtgtgattcgttgtgctgagccgaggactccctatgctgttttacttcagattattcattttacagcttaccttagaatttatttcccttctttaccattttaaactgttttacttataaatccagtagagccatagcctgacctcgtcactacttgactggggttaggcttggcacttactaggtaccaattgtggtgtactcatgccctttcctgcacatgtttttcgtgtgcagatccaggtactagtactcagttttgtggctaggagtcgttgtagctgcttcgaggagaccgcaaggtaattctgccacgtccgcagaatcctccgagtcaccttctattctagttagatagagacatgttatgtactttcccttttcgttgtatagaggtattttgggatagaacttgtgactaaatgtgacattccgggttttgggagttacatttgtagatgccgagtggcgatatttcatttagcaagatttactttattctgtctttatcttattgtttttatttaatatctttccgtaaatttaagcttacctagtcgtagagactaggtgccatcacgatacctatcggaggttaaatcgggtcgtgacaaggatgcccgtaaattcagggtgtttaacgggtgataagtttgatatccttaattgaactacgtatttaagttctaccatatgtctatttgagatgaaaaacctagaatcacttggatgctattattttaatatctctttagcatcttttgaatcttggcatcagagaggtagtgtttaataaaaaatatttttctattttcggtatccctcttactaaaacaacatacctatttttgttaaattaccaagaaaaaaggttttaataaatcattcaacatggaaacatacatgtattggtctaaatttggaccaaacttaatggttttgttggtcgtagtcgaagtctaggtcaaccaacatttggagacgaagggcctttctcgaaagagatcgacgttgggtcgaatagaagaatgtacaataacggcaggatagttttaggttaggaagagagaatattctatcctttgtactttttagggtttctaaagaatgtaccctatatataggaaacgaaggggagaaaaaaggcctctgaaaccctctgaaagaacactttgtaacattgactattgaagaatatacaacacttgtcttttctattgattctctagttaaaagataccttttcatatacaagatccaagagcctcgtttttccactcgtactccctatcatctgcgttactgacaaagatttagttgactcttatcacatgatattttgggcgagatatcctttaatattacatttattgccattgcatgcatttaatccgcacactcaattgtgtattcattatcaatcatcatcagtatctttgcctatcatttattattacaagactctgattcattctgcccatcatcaaactcgtagatctgacagttatcaagcttaactaggattaacctctcctttcattcactaaatctcctaaagagagcttcatcacgtttttggtaaaataatttggcgccgtctgtggggagtttctagttaaaatctatagtttctgttagataaaaaaaacacgcacgtacacaactatctttttccatttgcacaaagtaacaatgacaggaagaggagaagaaaggttaaaggccatagttgacgtcactgccaacctcatgagcaccatcaaacgaggctattgatgggggagaggaaaacgttacgcccaacgtcacaccagaacggagtggtttgcctgcccccatggaagtgtaaccatcatccgagaaagggacgcttccacatccacagtcgtcaccgccagtagtgaaaaattattggaggcatggctaacaagtacgctaaacaacttcctcgacaagccaactcaaggagagactcagaacgccgcaacggcggaggcatcagccattaacgcgtatgggtcaaaatctgtccatgaggatcaacgctaaagagagcagccaggggtcgacaaagtcgtgttcgtgttcgcaaggtacgaccacaataaacatctcgtctatagccgagatcgagctgccgctgagtctgtacgacagagcacctgttgtgaagcttgaggggaataatgaaaagtataatcaagagaaaacatactggttaaagaccgttggacaaatgggaacatggggagtataactagaaggtaagaaggcaagagaagggggcttaactccctaaacaaaaatgggataagaggaatacgagaaaacctccaataagggaaaagccaagatcttgcctgcagatcccagaaatccctgtaactgattcaacaatgacgggtccaataattatcaataaacattcacttcttctttgttattataagtacggaacaatgtatcaaagatgtaatcttatcatttatgtttgatgcctttttataaacttaagaagagctatgcaagcttgatctcactcaatgttcatgttcactatgtttagatctagacttagctatgtttgactaagatttacccttcattctcttcattaactagtttaacaaaaatcttagtactttttgcgcaaacataacgagcgactcgctccccacacaacaggtaacactaacaccactagtgatgcaggcaacgatgcactcacatccatacttaaaagatggaagaaatggaaaatgaaaataaagcactacgagaccagatgagagagcactaggagagggtcgacaagatacacagtgccccaaagctcctgcctaaactggacgtcggccggttcgtagaacaaccatacagcgaagaagcagcctcgcatcccattcccaaaaccttcaaaatgccgccatacttgaaaatatatgacggcacgacggacctcaaagatcacatagttcattacttcactgcggttaaaggcaaagacctctcaagggataaagtggcgtaggtattattaaagaaattcgacgaaacccgaacatgggagccttgacgtggtactcacagctaccagcacggtctataacaacatttgaggaaatgaccgataagtttgtaaccgcccacgctggagctaaaaaggccgaggtcagggtgagtgacagattatccttcagaaagtcgcccggcgagggactcagggactttctcgtccgattcaacagagtcaggatgagcttaccaaatgtatctgaaggcatggtcgtggcggccttccacaatgggctaaaccgaactgggtcaagggcgaccagaaaattgctgagcagactcatgaagtaccctcccaccacttgggaagaaattcacaacgcctactgcgccgaggtccgagaagacgaggacaaccgcagtgacccaactcaacgactgacgtcagtccacacagaattaagacgagatcgctgcaatgatacccgaagagatcactcagaatggttattcctccacctcctcgccatatggaagggccgtctaggctaaatacaaggactcaacggaacgacaaaggtatgctcccacttttatctactcacaatgtttgtgtttccctttcagaaatagtgtacgcactagaaaagctcggctcaaaggtgaagtggtcgcaatagatgaagtccgacccaaacactagaaggtcgaatgctctatgtgagttccaccaagaacgaggccacaagacagaggactgcatagctttacgacaagaattggtgaaaatgctcagccaaggacacttaaaagaactaatgagcgaccacggaagagccaactttggcagaggacgagaacaacaccaaggcccccaaagccaccctcccccacccgcaccatccagatgatcatcggcgggggcgataaagccacaaccaaccatatgaagttcaccaccacgcacaaactgaagcggttaataacacacgaacggtatgacgacctcgaagacagtatcatcttcgataagtcggatacccacggtttgactttccctcaccttgatgctcttgttattaccttacggattttggatactgatgtgagaagaataatggtcgatgatggaagcggcgcttgtattatccacccccgaattctcgcccaaatgagactcgaggataagatagtacaatgctgcataacactgacaaggtttaacaatgcagttgagcgaaccttaggagaaataactctacccgtcctagctggggggcgtcccattggagacaacgttctatatcatgaatcaagatacaacctacaacgctatcataggatgaccttggatacacggcatgagagccattccatccagcctgtatcaagtaatcaagttccctaccccgtggggaatattcagcattcggggcgaacaacgcacatcacaggaatgttatcgcatcacctaagactgtacatacactcagtagttgaagggagcgagctaagaagcatagcaattaccaaagtctgggaccaaataccaatgagcaaaacgacgtcatcaaggaactcggcattatggaggtcacggggtcaacggtagaggacctcgaccccatccaaatagacagaaacgacaccagtaaaaaagcctacaccggcaacaaactctctaaaccaggtaaatttcacaaatttctaactgacaacgcagacctatttgctttttcccatgcagatatgttaggtatcttgaaggatatcgccacacacaaattgaatgtagattcactctaccatccagtatagcaaatgagaagagaattcaatgccgcaatcaacgaagcagcccgcgagaaagtagaaaaactactcgccaacgactccataagagaatccaaataccccaatgggttgccaatgtagtcatggtaaagaagaaaaatgggaagtggcgcatgtgcgtagacttcacaaacctgaacaaagcatgcccaaaagactccttcccgctgccgcacatcgatctacttatcgatgcaaccggaggacacgagctggtaagcttcctggacgcctattcagggtattatcaaatcctcatggagtaggaagaccaagaaaagaccacattcataactcaccaagggacttattgttatcgagtcatgtcgtttggattgtagaacgcatgagcaacttatcaaaggctggtcaccaagatgttcaaagaataactcagcaaaataatggaagtatacatagacgatacgttagtcaaattcgaaaggaaagaagatcatatcaatcacctgaaagaagccttcaatatactaaagcagtacgacatgaaactgaaccccgagaagtgcgcctttggcgtgacctcgggcaagttcctcggtttcctggtgtcccaaagaggcatagaagtcaaccccaaccagatcaaagctatcgatggaatacctgaactactaaccagcaagaaacaggtgcaaaagcttatcggctgtatagccgcactgtcaaggttcatctcacgatcctccgatagatgccacaaatttttcaacgtcctcaaaaaagacaaccgactccagtggaactcggaatgtgccgaggccttaagagaactaaaggcatatctgtcctcgcctccactgctcgccaaagctgaatccggcaaacgcttcctagtatatttggttgtgtcggaagtagcgataagtgcagtactcgtccatgaaaacaaaggtacgcaatctctaatttattatatcagcaaaaccctggttgatgccgaaacgatgcatccccactcgagaagctggctctggcactgttcatagcttcacaaaagcttagaccttattttcaattcgatcccatatcggtcgtcacgaccttcccccttagaagcattttacataagcccgaactatcgggaagattggccaagtgggccatcgaactaagcgagcacgatatcagatatcagtcgcgaacgatgataaagtcacacgtactagccgacttcatcaccaagatgatgcctgaagtcgagcaggaagcctctcgtactgctccccaccctacctaacctatgagtcttatacaccgacgacgcttctaacgcgtcaggttcaggactgggactcgtacttgaggtctcgacaggcgagataatcctccaatctatacgatgccccgatatgactaacaatgaggccgagtacgaggccgagtacgaggccgtgattgcaggactaaaactagccctcaaatatggatcccgacgggtcgtccttcggtgcgactcgcaactcgttgtcaaccaagtcacatggacttaccaaattaagaagcaaaggctacaaaagtaccaaacggaaatccacaaactacttttggaattcgatgaatgtcaacttgatcaaatagctcgagctcaaaacgtcgaggcagacgaactcgccaagttagcagtagcaagaaaaagaaaaaacgaaaagaggagcgtcttcacactactccacttgttgttagatcaactcgaggtacactccgtgaacttaacctgggacttccgcaaccttattaaaacttacttgcaggagggaacactcccgccagacaaaaaagaagccataaagctctgaatacaggcaactaggtataatatcgtcgacaatgacttgtacaaaaggcattcgacggtcccttgtcgaaatgacttaggccaaactaaactagacgagtactcgaagaagtacacaaaggccattgcggcgcccatacaggcaaccgagcactcgtcagatgcctcatacaagctggatattattggcccaccatgaaaaaagaagccgccgacttcgtcaaaaagtgcgaacaatgtcagaagtacgcccccatgatacaccaagcgggcgagcacctccattcagtcacgtcaccctggccattcatcaaatggggaatggacatcgtgggaccactctcgacaagtcgatgtaacatacgtttccttttagttttgactgactacttttccaaatgggtagaacatgcgctttaacccaaatacgcaaacatgtgtcatcacattcatatggaggaacatcatattccgtttcggcatcccaaaagaaatcagctgtgataacgggccagaattcaccgggaaaaagaacgctgaattcttcgagaaatggcacatcaagagaatactctccacgccatatcatcatgccagaaatggtcaggccaaatcctccaacaaaattatattaaacatcatgaaaaagaaactcgaagacgccaagggactgtggccagaactgctactagaagtgctatgggcataccgcactatgctaaggacaagcataggagaaactccatattcattggtctacggcgcagacgtagtcataccagtcgaggtcggggaaccaagcctaagatactccaatgaaagcggaccaagcaacaacgagaacatgaagcaagacctcgacgaagtagaagaacgaagagatatggcatacataaaaatgatcgcccaaaaatagcaggcagaacggtactacaacaaaaagtccaaaattagaccactcaaagtcggggactatgtgctcaaggctaaaacgcaggcaagcaaagacccaagagagggaaagctaggaaccaactgggacggaccgtacaaaatcaccgcaacagttaacatagggtcattccaattagagacaatggaagggaaattgttaccaaacaattggaacgtcgctcacctcatgacttcaacttctgagaacagacgccctctaagtcttactctttttccctcactcgagtttttatccctatatgggttttaccgaggaggtttttaacgaggcgataaaaggggcgccccgaagttcaagttgattattcatcgctccgcctgtcgactactccagccagaccgatgaagggactaggtagacgaagagcttttcaaatgtatatattgaacaaagtatgtaatattctccaatgaaatgaataaacaaagcaacatgcagcatccttcgcacaacattcgacactccaaatcactccacatcctacattctacactaacattgacctcgttcgaatcacttacattcgagctcattcgaatcacttacattctacctcgttcgaatcacttacattcgaccttgttcgaatcacttacattcgacctcgctcgaatcacttacattcgacctcgctcgaactacttaccttcaacctcgctcgaaatgcttacgttcgacctcgctcgaattaccagcattcgatctcactcaaattactaatattcgaccccactcgaatagtttgcattcaacatcgctcgaattattcacattcgactttgctcgaactttcctacgcctggccaaagattgaccccaagtcagcctacgatcagcctactaagaacaacatcgcaacaaaataagacaagtaacaagaaagcaaaacatatagcaaaaggtaaccattccattataaattgatcgggttacatgaatcattttattttacaatgggctcgagtgcgccctcacaaaaacaacaaaacaattcaaaatctagtgcgaggccttaagtcgcgtcatcctctccagcatattcgtagtcgtaccaaggatcagaggcaagcccatccacaacatcatcatcgttgtccccaccaggtgaatcaggtgcatagccacaagtttcacgggctgcccgcgccttaacatgatcatcgacgagcttctcctcagaaaccttctcggcagccctcaaagacctgttcacgtctagatgagcctcggcatgaacccacatctcatataactctcgcgacacgctcgcattggcagaagcttgagaagtagacggtcgggccaactgttccttctcagccttcaagagcatgatctgctcatttaacctcagcaactttgcctctaaactcccaacttgttcctccaacctcgccagagctgccacctccgctatcgaggccgtcttgatcctctccgcctgttccaactccttgactttggtgcccagctcaaccctcagatcggcagtcctcgcctctccgatcaagctggaccttcaaagacgccactcgcgcttgaaggtccgagttctcagccactatcccctttctcaattcaagatcatcctccttagacttcaacgcctcctccaactcactacaccggctaatagccttcataatctcctcatccttctctttcaactcttcatccctcctctcaatctcatcacgtaactcctggaactggccgtcctcaccaacgctcctgaccaccttccggtacttagagcggtactctctatacttggaatccatcctcctatattgagctaccctctcctcctcccgccgatcacactcaatgtcgaggataagagtctagcaaacaaaaagaaataagttagccaagataaagcaatactagcgaacatgcaaaagcgtaggaaaaatacgcacccttagggccactccaaataagcaaaggaaaggtcggcgtctttcaacgtctgcaacgtcctattctcggactcagtgcacaaaggggagaatgacggcgccacacgctctgtatcaaccaaaaggttgaagtctacagggatgacaatatggcgattgggacctccgttcttatctctacgggggtcgtcctctcagtgaaggcacgtacctcttagggttcacgacccctgcatggggaacacaaccttttctctccctcgacgaagagttgccctccacaacccgcgcgagctctttgccgctaccaatctctccccaagggtcgtggccctttccgtctattcaacaacaacggccttccttgtctccaccctttgcctcttcctcagcgatggttcatcgccataagaaggctcgtcggtaaagagaagaacctgctgagacgaggcatcgtcgggaatgatgatgcctgaagagacgggttcctcttcctgctgagtctaggcttcacctcgcacatatcgaccaaagcgaactccatcgcggccgaggtcaccttctgacgaaaggcaagagcaggtttcttctccttcttagaaacccgccaactggatacaaacaaggagttaagccagaaagcaataaagggcgaaatcgagcaagggaataagaatacttacgagacaggaccatcggtccataacgcttatggaaggaataccaatcacggattcccataacatggggaaacaagcgacccaaccaaccctccatgtccagaacgagggagggagaatgctttacagctgaaaataagaaggcttacaacgtatcagaagtcggaaagaaaagaaagtaagtaacaaagaacgaatggcggaaggtacgagaagacacttacgactgtaattccatttctcaagaaacccagtcgggtccgccaccaaatgttcagtcctgacaaagaaatatttgtgccagaacagccgactcgccttattgtccatcccggccactaatccattcgtcccgcgattccgcaagtgtatcagagtgcctttgaagaaggtaggcgagaataggtgcaataagtggcgaagggcgacgtcgcatccagccagttccgcatatttagccagcattaggaagaccttatataggtaaggagaaagttgtgccggccaaacgttgtagaaacgacagaattcttcggctaaccgtggaagacgcaaagtgtagccaatcgtgaatgggtaggcgtagaaggtgtagaacccaggacagtgaacctgaactgtatcgctccctgcagggacgatctcgatgcaagaagggcgtatttagcccgcatctccaccaattcggtctcccccgattcagaaagctcaggctcggtggcaggaccaggtcctttaggaaaatccttcctagccgcaggatttttgggcaccacctcttcaatggtggggaagctatcatctccctcaactgaaacctcttcatcaataggaagaatggccactgacaaaagagtggcgtcagaaacatcgtcgtgactatgaggagaagtcgacatgatgattagtatgatataagtaacaatgtggtagacaaggttagtgatcagtaactgaattagaaactgggagtgaagaggtcacaagaagcagaaaagagatgcataagcaagaatgagtatctgagaagaaagagacggtgaaaatttcaaatgaaaaacctttcccctatttatagggttgggtggcatcaaaatcgaggccaaaagctatctgtatcacaagaatcgaagcaccaacagtgcagtccctgcattggaaagacgcgtaatgatgacacgcgtgacaacgacagcatctgacgtcacctgcgccaatcacggccttgccgagcattaatgatatggtttcgaccaaatttctctcataacgggcgtggtgcaatccactcatcaaggacgagggggtcacgaccttaataagcggagggactaattgtattgatcaaaatttggaccaaacttaatggcttcgttggtcgtggtcgtggtcgtggtcgaagtctaggccgaccaaattttggagacgaagggcctttctcgaaagagatcgacgttgggtctaacagaagaatgtaaaataacggcgggatagttttaggttaaaaagagagaatattcccttgtactttttggggtttctaaagaatgttccctatatataggaaaagaaggggagaaaaaaggcatatgaaaccctctaaaagaacactttgtaacattgactattgaagaatatacaacacttgtcttttctattgattctctagttaaaagataccttttcatatataagatccaagagcctcgttttttcactcatacttcctaacatctgtgttactgacacagagttaattgactcttatcacttgatatattgggcgagatatcctttaatattacagttattgtcattgcatgcatttaatctgcacactcatttgtgtatttattatcaatcatcattagtatctttgcctaacatttattattacagtactctgattcattctacccatcatcaaactcgtagatctgacagctattaagcttaactaggattaacctcttctttcattcactaaatctcctaaagagagatttatcacgtttttggtaaaacagtacactccaaataaaatggaaataccgatacatgcgcgaaggttctaatgattccttttctttcacaaatacggcatattcataatttgaataaggaaaaatttaatacataaaacttagttgatgttaaaaatactaaatattagataaataattaaatgactattttgtctaggtgtaaattagttttaaaaggataaaaaggacgaacgatatttcgctaacgaccttcgttgattttcatatagttaaaggtcagctacaaagaggagttcaatttagtagaaaaggtaattaccacataattttataatcataatgacatgttataatccgaatccaagatcttgtatttttcttctttttgtacttcaagtgtgtgattataactaagacgtagaacttgataaaccaagtaaatgtgttccacaagttttgcaacttctttgcatgggatacttatccctttgccaagataactaagttctggacgcactgcttagccagatcctttacaattcgtcagttcaatacagaagctgtcattcctcaacttaatagccaagaaacaaaattattctgctaggcaatatttgaaatgagattcgtggttaacttcaacacctatagaatctgtccatgatcttacgtacagagaagaatttagtgcattaatgctactttgtccatcatcatgaccctgacagtttcttccaaaagccagcaacaaaatcttccatgcatgacctgtatgtttgcatccctgggactttcttggtcagctctaaccccatagacatccacctctttgcttcatccatattccccatcctcacagggatagctgctctgttccatgctgtcatggctagccatttcgcttcttcaactggatattctccttccttcaaacccaccattatcctatatgcttgcttgtacgtttccatcgttgcatcgtcattgctatcagctccatggatgcttcttagactgacaagtttcctcagtatgagtgccacattttcatagtcaggcgaagatgaggccaggagtgtggagaggcaggtgcttaatgcaaaggtggctacttcgtggttggaacgtggtccttgtgaagcgtcaatgccaatctgaagtagatgctttggattgcaacattttgagtttgcaaaacgcttaataaggaggagctgttgacttcccgtgtcatcaacccttgaatacagatcaaaagcacaccaagttgacataaacaagagattaggctcaatcatagcctctagcttgtcatattccgttgagcttaacattaacatctgcattaagcaccacatgacaatgaaaattatagtctagagaaaaccatgtctcgaagatcatgaacataatatctccataatctggcggcgaagaaatctccatcagataagtaccaaaataacaaacgacaaagtaataaaatgtgaaggtcaaataaatggaagaggaaatattcaatgatcgaaattggttacctttcctgctctgtctagcaaagaaatagcttccttcacttcattttccagtaatgtaatctttctttgcctctcatctgagattattgcagacacggtcataatcagtgatttgcataccattacatggttcccttctttctcttcatcgactgaagcaccataaaactccgatgccaatctaaagaactctgcagatagtgcatgttggtcctcctgccctgttttaacaccggaattccatgcattcactgaaaaccagttcctttcccgtctcccgatctcacctttcccaaaaaatttgtcagcacctaactcagatagccgagtatgagctcgtttcatctgctttaagatatcagaatcattctgaggaccctgagatagagtcgtaactaaagtcctgaaaactacaacctcaattgttggcatctgtttccctgtggggtagaagttcaagagaagtgacagagaagcaacagtaactggatgacaacgacagacaatagcttcatgagcagctagagagaggaattcagtggtgaaatcaaggcgacttggcattgcctgcagctgagagatagcaccatcgctttcgttcttttgcaggtagatcttaaactgccatattcatatatatctcaaaattcacatagccaaacaattagaagcatcaattgaatacatagatattcaaggaggggagagcaatcacaccttcaagaaggtactagcaatatttggttcaagctgcaaaagaagaaaaagtatcagatcaagttaacgagagaaaatatgcttaatttattgaatgcaccttctctgcctcgtttatgtattcctgagcgcgatctaactgtgaaaggcccatatagcagagacataaaactctaaatccctttgctctgagatttctgctctctacgtcagaagggttataaagcaaagatttttcaaatatctcagcactggtctggaaatcttttgaccggaagtgttctgctgcactgtggaagaatcaaaagtagatgttaaatgataaatagaaagcattgccacttcacaactacatttgcaataacgtaaagaaccaaaaagaaagttctgatcaatgctttcttttttccttttttaattttttattctctgccaagctgtggaatttaggggttaggtgctgaagcagtcaagattgaatctttcagaaagtatatccctttcacatattaccaataagaaatactagtaacaattatgataggctgctagtaactgccagaggcttgcttttgtaatacaataactatgcttcaagcccaactagtcgagatccactgtatgaatcctcaataaccattctgctatatttgggacctttttaataataaggcattaattgattcgagaatgcaactccttttgttcaatacttgaattcataacttcaagttctatgtgacaatcagaatatgaaagatgtattcagcaggaaagcaaaaaacaattgaatataccagttccaaagaagagcatgcatagctgttctctctctggaaatatcctctccactcaagagcgtcagaatcctgtcatcagacaccaggtctgataccacctttgccctcaatctggcctcttcaccagcaccagcaggatctcctagtaccttactcaccaccctaattgctgcaccggcactaacatggcacctttcaagtagtcctagaaacactcccttcactgttgctgctccagcagcacccacaacttgaaagtatgattcaacagccgatacccaaactccttcaggaatccccttatccactaccattcctcttagctccttctctgcttctccgaacctccttaatcccagccatgctttcattgccaacacactaaggctcggatgctgatctttctcaccgtctctcaaaaccttcacacatttcaacacgctctcgaattcatctctctgcaaatgaaccgccgccaaaaacctaagcgtcttcgatctcagttccttcaaagctaacgtgtcctctgtcctcttcacaactgtcaaacccctttcacacaattccagtgcatcattcatcagtctcaatgcttcattcactccagaaacttcatttttcgatagtattgcttttccaaatgtcaaatactgattagctaaagctttatagttctccgcaacagcgaagagcatgcttttcgatcgactcaatagagcgaccgctaaatttctatcagagacttcccaagctgtacgtgatcgagcaatatttagatctaacagaaaccttttctcttcattttctgaaatagtactgatttcaactttcgatagcagatccatagctttctcgaagcaatagttagcgtgttcgaattttcgaagatcatgccaaataagaccggttttatggaagaaggaggcagatttaaatgccggcgaggggatacctgagacgttactggcgaggaagaggaggtcggctgatatttgacgcagctttgcgtgttcctcgtcgattttatgaccggacgttttaaaaccggcggcatttgaaagatcgacacaagcattccaaaggcggtaggatagtttccaaatgtggagcttgacggaattagggtaaggagagagggaattcagctgagagatgctacgccggagatcggtggagaaggaatccggcaaggcagttccgggtacgtgtttctcgatatctttgattgatgattcgatttgtgagcatagttgactgtgaaggttgttttgacctccccggagctccggcaaagagatctcgtcgattttcatatttgtgagcgatggttactgggaaatttgaaatgagagtaacgtgatcgtggtttgttttggagggaaacgggaaattatagaagggatttataccgtatagtccatcactttataactttgacatttttagttacttctagcttttattatcaatactaaatactaattacgtacataaatgcatcgttctcgctatttttgataatttgaataaaggaaatgaaatcattatacattgctttcactcactcagggattaaatttaacggcgatattttccatataattcaatagggacgtttcataaaattgttaaaatacttggtgatacatctaactgctaattattttttcaaactacatcaacaaagaattatattaagaaattgtatcttaatctattccagtatctcagtcatgtaaaatgagacgaaaaaagtattaataaggttcatcttactaatttctcaattctataccagctttagttttaagatcaatttgattagtttatagaataactgggaaattaattaatttaaataaattcttgagaagattcgttaaaaataaacaaggcgcaaaattaatacattggaaataatgcaacatatttttcaaaagaaggatattacacaacaatttgtggcaaaaagtaaaatgttctaaaggacagaatagtgataagaaaaattgaaatgataattaagtagacatagttcaatactttaagatcaggtaataaccaagctatgtaattactttcgcgaattatcgtaatgttgttgtagtattgacatttattacgatggtaaatatattaataatactggaaaatattttaatttgtaattgacaaattaacattacttaaaaatattattgataaatttaactaatgaaagaatttcgagcaatataataaaaatgtaaaactatattaaatttcatgaagaaggaaatctattttttgttatattttattaaaaggaaagtaataatgaagacattaaatcaatggtcaaactaataaaaagtcacatggtaatggaataatactaaataatgaacaatacaataacaataagcaagggacaaaaagaggagaaaaaaaagatatttagggtaaaaatataaaagaataaaacttatctgaactcgagatgagaaagttatttaaattttgatgagaaaagctagtgtataatatcatataaccgagatcttaatattcagggacgtttcgtcgcttgcgtcatagttaggctcttcgctgacatcattactcattgaggcgaagttcggaaattcatatcgtttttcgtcaccgccttcccaagaaacgaggggactatctgtatacggtcaaaacggcccttcgtatgactaatcgagactggaacatgaaaggtcaaggttcggtctcgtgatatattaagccatggtgcgaagttagattgcttagctcgtaacccaaagacagatcaaggtcaagatcggccaagatcgagaccaagcaaaataaagatcgagcaagatcgatgaaagtttacctggttaagtaacaaaaacctttattattttctgaaaacaattttctttaaaatttaatttctcgggcttgggacctcgaaattcaattccgggcatacgcccaagtcccatattttcttacggaccctccgagaccgtcacatcacgggtccgggttcgtttaccaaaaatgttgaccaaagtcaactttattcatttaattatcataaaatttcattttcatcaaatttcaacataaggacttcccggctacacgcctgggttgcgcacgcatattgaggtgagattaatggaggctttcggggcctcagaacatagatttagctaggattacttaggatgaccttttgggtcatcacaaaccttgtccttcaacgacgaggacgcagaagggatcatgcaaccccataacgacacaccggtaatatttgtacttatgaataagactcaatttaaacatattttaaattgatccaggtagctcagccaacatcattcggtagaggtcataaaataactcggcctataagatcaggttgcgggcgcgacccgagtactacacggcttcaacatggcatgtgaaaccaccaagggcgagataacgttactagtgaacgtggccgggaccatccaagagacaaagttccatgtgatctagggctatatgaggtgtaacgccctgttcgggaggccgtggatccacaacatgagggcagtgccctcgacccttcaccaggttctaaaattcccgacaccagagggagtcaaaacagtctacagggaacaacccaccgccaaggaaataattgtcgtcgatgaagtaattcctatattggcactctcatcgatgaagggatcaaattcgaagggaaacaaaaggtcaaatagcaaccacaaacgccggcctcgacccaaccagagaagcaggggactgatgaagatgatgattatggggtccctcgatccttcagtccccgatgactccgatgccaccaagtcaacgatcgaagagctggaacaagtcctactgatcgaatatctgcccgagcgaaaggtatacctgggcacatggttaacccctgagctcaggaaaaaacttatttaatttcttataccactaagctacacttttgggctgtgtcaaggggattcaaaacataatatatagaggtaaaaaacagatattgccttatacatacaatgtaatttttcggcgaagggggttggtgaacccccttcgccccctttaatccgcccctggtacctactgttataatgtaatgccatttggattaaaaaatgctggtgccacttatcaacgcctagtaaaacggatgtttgaagaacaaatagggaaatctatggaagtttatattgatgacatgctagttaagtccctgcgagcagaggaccatttaaagcatttgcaggaaactttcagtatactgaagaaatacaacatgaagctgaacccgaaaaaatgcgcgttcggggtcgggtcaagcaaatttgtcggcgtcatggtatccagccgaggaatcaagatcaaccccgacaaaatcaaagatatcgaggaaatcacggtagtagtcaacgtaaaggtcgtgcacaggataaccgggcgcatagctgccttggggcgattcatctcgagagtctccgataagagtcatcgattcttctcgctgttgaagaagaagaataacttcacatggactccgaaatgtcgataggccttggaggagcttaaacggtacttatcgagctcgcctttacttcacacggcgagggcagacgaacaactttacttgtatctggaagtatcagagatagcaggaagtggagtcctagtctgagaagaacgagctacgcaattccctatctattatgttagtcggaccttaggtgaggccaaaaccaggtatcccaaccttgaaaagttggcgttcgctttgataagcgcctctaggaaactaaaaccatactttcaatgtcaccccatatgtgttgtaacaacttatccacttcgaaatattttgtataaacccgagctttcgggatggctggccaaatgggccgtgaaaattagcgggtatgatattgaatatcgaccccgaacatccattaagtctcaaattttagctgacttcacgtcggctctagtaccccaggtggaaagagagttaacgtaaactcgggtacgtcctcgggaatttggaccctctttactgacggtggttcgaacgtaaaggggtccggactcagcatcgtgcgaaaaccacccacagataacttagttggacaatctattagaactgtaaaattgactaaccatgaggccgaatatgaggccatgattgtaggtctcaaactagacagtggcttgggagcgaaggtgatcgaagccagtgcgactccctcctcttggtgaattaggttaatggatactaggataagataccaggataagttacaagtaactctacattgatttaaggaatggactttgcaacacatgcctcgagatcagaatagtgaggttgatgccctcgcaaacttagggtcatcggtcgaggacaacgagcttaattcgggggtcgttgtgcagcttctgaggtcagtggtcgaagaaggctaaggcgagataaactccacaagtttgacctgggattggaaataagtacatatagtatttgaagaatggaaagcttccctcagatccaaaagaataaagggccctgcgcacgaaggcaacacgatttaccttgtctgaagacgtaaccttgttcaagagaatgttcgatggtccactagcgatatttctgggaccgggagataccaaatatgttctgagggaagttcacgagggcacttgcaaaaatcattccggtgccgaatcaccggtccaaagggtaatcagagccgaatattacttgatcgacatggaaaaagattcgaaagagtttgttcaaaaatgggacaagtgccaaagctatgcaccgatgactcaccaacccggtggatgataacaacacgataggggtccaagaattgctaaagaaaatcaagaaacatgcggaaactaacagaaaataaagaaacaaaaaagacgaaaaattaaagatagattgaattcaagaaaaagttttcttgaattcaagacatctattcttgaatttgaatcctaataacaacaattagctaacgaagaactaatcgcctttggtagagacttaaaaacaagagatagattgtgaaacccgaccctttagaataacaagaacaacaacaatcctatacttatcacctttcttgaatacctagaagtgatttaagattttgaaaggggtttaatcttacccccttaagttgagtcttgaaggttgaagaataaatccaagagtagccacacacaagagtgcaagaaaaatcacacaatttttattgatattgtctataataacctaagtctaaaaataaagaagacatcctttatatagagaggggtcacgaaattgtacctaaaaaacaaggaaataaagtccaactaccttaggaaaatgaaaatactaggaagcataaaccaagtcattcttggaaagtaattcgaaaatttttagtaaaaggaaaacataaccttaactaactaggaaagcaataaatatagtcccataatatatggaaataagtcccaaaccaatcttggatagaatcttgaaaatcttgaaggaaatttgcaagcaacttggcacaaacttgcactcaacatctagcacggccattgtatccttcttggacatcaagtaagtcctttttatgctatgaaaacgtggctttatgtaggacttcatgggctgcaagtttggacacattttaggtgccaaattggttcagaagttgactgactaggaccttcttcaaagaatgtctcttgggatccaatcctcctcttattggacctaaacttgggccataaaacaattgtaatatctagtcaattcatatcctttatccttgagctttttcatctcaattaacaacttatttacttgcacttgatgtctaatgaccttgtttggcaacactttagcttgacatcttgttaaaggccttctttgagattccaaagcttcattcttctccttgaatagatttgagcttcctaggatgctatcagggaactactccattcggtcttatcaccatggccattcataaatggacatcgttggccctcttccatgggcactaggtaaagctcaatttattttatttattactgattattttttaagtgggatgaagcatcgagaaagttagggagaaggaagtcatcgtctttatttgggatcatatcatatgtcggttcgggatgccctccgagattttgtgtgataatggaaaacagttcatcagcatcaaagggaccaaatttctcgaggatcacaagatcaaaagaatattatcaacaccttatcatcctaaggggaaccggcaagcctaatcgaccaacaaaaccatcatccaaaatcttaagaagaggctaaccgacgccaaaggaaagtagaaggaaattctaccgaaagttctttgggcatgccgcacaacattgaatctattaccggggctaccccgttctcattagtttatggcgccaaatctctaataccggttgaggtcgaagagcagagtattaggttacgatatgcaacgaaggagtcaaatgacaaggccatgaatacaagcctagaattactggatgaaaggcgtgaagccgccctcgtccgatggccgcccaaaaacaacggatcgagagatactacaatcgaagagccaatctttggtattttaacatcagggacttagtgctaacgaaagtcaccctcaacacccgaaattcgaactaggggaaattgggtccaaactaggatgcaccgaaccatattctcgaggtcaccggcaaagggtcctacaagcttggaacgatgaatggagaacaactaccgagcaactgaaacgtatctcacctaaaacggtactaccgctaaggtacgtgtcacgatccaaactgatgtgccacgacgggcacccggtaccttactcaactgagtaccaacataacgtatctttttgaatcatactatcatagataattgagctggagaggttgccctgaaataggtagaataaaacatgtaataccaacttatacataagacatatgagcctctaagaccaaaataaccactcgtacactaaacatacgccgacaaggccatacaatattttacgtacatgacatctgtctacaatcactaaggatacataattttcataaaggtcgggacagagcccccctataccatacaatacacatctaaatcatacagaccaaacaagcaactccggagcaaatggagtgcatgaacatcttccgctgagctgatcacctacttggaggactctcgacctactatcgagacctgcgggcatgaaacgcagcacccctaagcaaaagggacgtcagtacaaataatgtaccgagtatgtaaggaatgaaaataagtaaataatagacatgagagaaacatggattaaaagactcgatatatacgtctgcatagctctgtgaatcatttcatttttataatgtcatgcatatgcgtataaatgtcataccatgcataggtatatgcgttcataacatcatcaagcctctgagggcatcccaccatatcatttcggccactgtgggaaaatcatcaacgtatccagttggtcaggtggtggtgcgtcaacgttatatatatataacgccatctggtcatgggtcaatgtacatgtataaatgcatgaaatgcataagtaatacattaataagatttctcgaaatgtcataaaaataatatgcatgtcggataaactttatcaaatatgtatttttctgagacccatgaacaaaagatataataataattcacatggggaatcaagattatagacacccctattatttttatgaatatagtcaattatggaagttgtgcgtttgctcgtttcgttcgtgtcgtatagatcatgccaaaaagaaagaagggatagccttaacatacctgtaacgattcttttgacaatccctttaacacttgttgattgtgacaacacgtaatggcagatcgaagtaggaaaaaatccatatgatattcttgagaaagattgtatcgtgctctcttagaatcgcaaaattccgttgcgattacacagtataatttcgtatgaattcctctgctaaaccaagaacccccattgctattaccatatggagtcatgtttgaaaattccctccaaatgaatttttgatgttaactgaagacaagtgtaagactaatataaattgccctcctacggatatgagtgttgtccatgtgtccttttaattaattgcctaaagtaaagagtcactattagacctatctccacttgctgccaccgggggggggggggggggggggggggatggatacaaatccctaattatatggttaatctcccattaaaccaataattaaccaattatccacataattaagaattatctcaagttaacaaaatactactcacttttaacacaacacactttatacatcttataatcatggtcatgtggtaccttgtatggcactagcccataaatacggggcattatagcttagaccgtatggccaaacttcggcgaaactcactttcttcgattttcttaacctctcaccttcacgaatttacttatcacttctttgaaataacataatacttataatcccaaaataatctcattcccaaacttacgttggttaacttatgacgaaactttaatgtacaaaaatgcgggatgtaacatctcatttccgagctttcatcaatttatttatggcgtacttccacgtacaaaaacatggggtgtaatagtacgacccctttctttttcctttgaatttcagactaacacttgcaggtgatcaacaaagaaatgacgatggatttttcggcgaacggaacaaagtttttaggtctgaaagcatgtgttgcactctttttcccttagaccagttttatcccaaatgggtttttcggcaaggtttttaacgaggcaacaatgaatcgtgctattagaatcaagttcgattacaaatcggaatcgaatatcaattcaacaatatacgaggttcctttgcaatcaacctcgaataccgaggggggggggggggggtacccttgtatatgagttatcttcgaatgtcaactctagcgaggaaactacttcataaaaagagggtttcgatagataggatttattgtaaggtccaaacggtcaaaatgaaccatgcccacgtagattgttcgagccctggcataaacatgtacgcatgtatgactgttttgaccaagaataaagagaagtactttccttgcaaacatcttatgtttacaaatttttcctttttacatctcttaaaatagctttgtacttctgaaaataacgagcccaaggacaacacttaattggaatacgaacgaccactctctcactcggggaccgtccaactcaaaaagcccaagtcattgggccttgtgggcaaaaaccctaataggcaactccccgttttctaaaggccacagacaccccactccgggactattatcccggacaagcccgaataaataggaaaataagcccaatgggtagctcccaaactaaaagtctatggccaatttaacatggctcggagacgtttgaaatccgtaacaaaaaaaggccttcgaaaaagtaaaagttctttcacaactggttctaaaggctaccctcagcaaagtcataaaacttaagcttttgtgttgcccacggccacctcggatctagccacttcgagttcgttggccaaacttgccttatcagaagcggccaaatccaactgagactgaatctccttgatctctcggcctgcacaaggccttctttcttgcagcttggagctgggtctcggcggactctagttgtgcttggacgtctcttttttcgaggctaggatgtccatgttctttttgaattcttccgctcaacatgtatcgtatttacctacgtctagagccgtccgatatgctcgagcctctttcagacctgtagaattggattgttagtcgttatctccaattcatcttcactatcgtgaagtactcggaatacatgctcgaccatatcagtgtgctcttccaaagccacaactaaatcggcttgaagcttctcgctaagaatcctgtaggagtaacttttctcagtgaggtcccgaaccttagcctcacgctcctcccgaattctgaggaaagcctcatgatgcaacactaaatcctgtgagaaaggaacaaaagagagtaagcttgactgaaaagagtgggatgtcaagggggaaaaagagtaagcttgagaggaaataaaagagagacgaccatgatatagaaaagacccgtgaggtagagaaacaagagggtttgagtgaagtaaaagaagaaaatcttggtgagagagaagggtataaggttgaggagaaagttagtcttgtgataaaatccaaaaaaagtgtaagcaagaaaaaagtttctttacttcctaacccgttaactctttcttgttttagttcttgtgattttgtgcagccatatgtggaaagaaattttaaaaggggaaggaggcacaagagatgatagcaaaggatccaatcggattccaacatgaattatgcaaaatcaattcttgttggatggtggaagataaaagcttggttaatttctttgttgttgaaccttttgtctattttgatccttatttacaggtttacaacatggagttctttaaaggcctttctaagttagagacaatgcataaaagaataaaaggtgatgttgttcccttaataaataagtctaagtatggtatgtataattggtttattcacattcttggcctttctagaacacctaaggtatttttggaggtaatgaactatactcttatgtcttatgttggtgactttataatttttgtggacgatgatatattgatgcatatcaagtcattaactataatatctaatttcaagtgcaagagtaattttcttacttttgaaattgagtatgagatacatgatatgcattccaacttggtggaaggaggcatgaaatttatgagaagaggcttgctaatgagttaaatgttctttattctcttattcaagtgcctaatgagtattcatgtgataaatttctagagtgtgagtttttttgttcgatgggaagtcattcccctagtcatgttgattgtgagcctttaaaagtgcttgcttctagtaaagaggatatgcatgattattgtgacattagtgatcaaatactctttcatgaacctatctatgactcgttttgtgatagtttgagcaattatgtagaatccattgatgtagaatatattattggggaaagttataatcgtgagcttgaatgtattaaaaatattattttggaatttatgagttcttctgacctttctgagaatttatgtgtttctttgaataacgtttagaagaatccataggatttatagttgatacttgtctatatcataaaagtatcttatttgatacacgtgacagagataattgtgttaaatggatgcatgaccaatattttgtaatttctttagcctgcacatgtttggactaccttattgataagatcgcactgcaaatttcattatatagtgcatttgagataggtttttattggacaaatctaagtaggcataaattttgttgggatgatgatgtccatattctttataaaggagtatttattattaggcttaattggactaagtggaaacatggtcactatcttgttttattcttaccgtttttaaagattagtggatgacatttaatagtgcctgtctttgttttcttgcacggtcaaaattcgaggatgaattttcttcaagaagaggggaatgatagcatcctaggaagctcaaatatattcaacgataaggatgaaattttggaatctcaaagagggcctttaaaaagatctcaagctaaaaagtagcaaaacaaggtcattggacttcaggagcgatcaaagaagttgttaggttgtaggaagtgcttaaggataaaggatatgagttatctaggtgttataattattttatggcccaaattcgtgtccaagaagagatggattagatcccaagaaatatcctctaaagaaggtccaaatcaggccaccgttggaccaatttggcacctaaaatgtgtccaaacttgcagcccatgaagtcctacataaagccacaatttatagcataaaaaggacttacttgattttcaataagggtagctagatgttgagtgcaagttggtgccaaattgcttgcaaatttccttgaagatttccaagattttcaagattctatccaagatttgtttgagacttatttccatatattatgggactatatttattgctttcctatttagttaaggttatgttctccttttactaagatttttggaattactttccaagaatgacttggtttttgcttcctagtattttccttttgctaagatagttggacttgttgtccaaagtagtttaggactttatttctttatttttaggtggaatttcgtgacccctatatatataaaggggtgtattctttatttttagacggaaattgttatagacaatatcaataaaaattatgagagttttcttgcactcttgtgtgtggctcttgggtttattcttcaaccttcaagactcaacttaaggtggtaagattaaacccttttcaaaatattagatcacttctaggtattaaataaaggtgataagtttaggattattgttgttcttgttattctaaaggttcgggtttcacaatctatttcttgtttttaagtctctaccaaaggcgattagttctttgttagctaattgttgttgttaggattcaacttcaagaataaacttcttgaattcaataaggatttattgaattcaatctatctttaattttccgtcttttttttgtttctttatttttcttttagctttcgcatgtttattgatttttttagtagttctcggacccttatcgtgttgttatcatgggataagaaacaaaaataacctggagttcggtagcagacctcagtaacaataaatcaaagtaggagttatggtagtaatgttatacggatggataaacggatctatgactaatggtagcaacaattgcgagattggacgaattccgaccacaagtcgtggtgagagaaagaggcctaaatgggggaatgtactggcctttgggatccattcacaaaacacttgcctagatggaaagaggagtactaaagtattcagaagacataggttatgaaaatgataagtgcatcaaccaacattcgaggacgaatgttccaaaggggggaatgatgttacacctcacattttcgtacatagaagtacgcccataagtaaattgatgaaagctcgaaaatgagatgttacatcccgtattcccgtacgttaaaattttgtcgtaagttaatcgacgtaagttcggtaatgagattattttgggattataagtattacgctatttcaaacaagtgataagtaaattcgtgaaggtgaaagggttcgaagaaaatgagtttcgtcgaagtttatcaatttggaataaaatacggtctgagctataatacccgatatttatggactagtgccatacaaggtaccacatgactaataataaagtgtacaagaatggtgactcataagtcactatgttatgtggcaagtcttaagaatgtgtgtaatttccatttaataaagaaagacatatataacatgagtcatatccattcttaagagatataagtcacaaatccattcttatatgcattcaaacataaatgtttgtatgttacaaacataagtctcaaacgtaagtcatatgcaagataggatcttcaacaattaaaagcaacgtgagatcttgcaattttaagggagtataattcaatctttctcaagaatatcataaggatttttcctactccggtcttgtcatcacgtgtattgtcgcgattgtcgtgtgttagagggatttttcggagaatcggctcaggtatgttaaggctattccttatttcgtttgtcatgatccatacgacacaaacaaaatgagcaaatttacaatttccatacatgactctattcatagaaatattagagatgcttatgttcttgattccccatgtgtcatattattctatcatttgttcatgggtcgcagaaaatacgtaagttgataaattttatttcgtgatattaatcaaaggcatcatggttttatgaaactccgaaagattttattgacgtacttctcatacattgcattcatttacatttacccatgaccaaatgtcgttatatacgcgtatatatgtataatatatgtatatgggatatgagaaaaagctacgacgttatatacgcatcaccacctgatcagatggtattcgttgatgattttcccatagtggtagagatgatatgatgtgatgccctcagaggcttgatgatgttatgaatgcatatacccatgcatggtatggaatttatatgcatatgcatgacattttaaatattaaaggattcacagagctattcagacttacatgtcgagtcttttactccatgtttctctcatgtctactatttactgattttcattccttacatactcagtacattatttgtactgacatccctttttcctggggacgctgcgtttcaagcccgcaggtcccgatagacaggttgagagtcctccaagcaagctatcagctcagaggaaggtgttggtgtgctccatttgctccggagtcgcctatttgttcagtatgcatttgacacatattgattggtatgtcggggccttgtcccggccttatgacagttatgtaccttagaggcttgtagacatatgtcatgtacgtaaatgattgtatggccttattggcctatgtttagtgtacgagtaattattttggtcttatagtcccgtatgtcttatgtataagttggtattacatgttttattctagttatcctacgacaacctttatgtctcatttacttatgatagcatgatacaatacgttatgttggtattcggttgagtaaggtatcggatgcccgtaatgtcggtttgggtcgtgaccgcaaatgcgaccaaagggttgcaaatgcagcttctactaggatcgaaaatgcggcatatatgttgcaaatgcaaacactgcctggttcgggctccttcgaaattgcgaagccctcatcgcaaatgctagatttgtagcagttgccaagaacacccaaaatctggtgtgttttcaaccccttccacacgtccgacactcaaccgagactcagggctccattctgaatactcacacaagtctaacaacaatatacaaacttttcttgcgcaatcggaacactgaaataacatcaaaaactaagaatcatactctaaaaccaattgaatccaatttatgaacttcaagttcttcaatcttcttccaacgtgcccaaacgtacttttactacttggaatgataccaaattttacgtgcaagtcttgaatgacattgcggaacaattcccagtctcaaaattccctttagacctcgatatcacaaaaacgtgttccaaaccacatttatagaacttccaaaccttcaagaatccaactttcactatttagcgccgtaacactcccgggtcatccgaaacccgctccgaacatacgcccaagtccaaatcatcatacgaacctattggaaccgtcaaatcccaataacgaggtcgtttactcaaaatattgatcgaattcaaacttggccttttaagccaaccttaaggaaccaagtgtttcgattctaacccgaactctttcaaatcccaaaccaaccatccccgcaagtcataaatcattaaaagcaagtaggggaagtattatttaaggacacgtggctttagaaagcaaaacgaccggtcaagtcgttacattctccatctcttaaacaaacgttcgtcctcaaacggttctagagtcatacttggagtgcttaacaagtgtggatatctgctctgcatgtcctcctcgggctcccaagtcgcctccttggctggttggcccctccactggaccttcactgcggaaacgctcttagacctcaactggtgatcctgcctatcaacaatagcaattggctgttcctcgtagcctaatctctcatctagatgaatggtactgaagtccatgagctaagtcggtgtggtacctccggagcatagatacatgaaaaactggatgaacccctgataggcttggaggtaaggcaagctcataagcaacctccccaactcacctaaacacctcaaatggacctataaaccttgggctcaacttgcccttcttcccgaatctcatattacccttcatcgatgagactttcaagagaactttcttgccgaccataaatgatacatcacgcaccttctgatccgcgtaactcttctatctggactgtgtcgtgtgaagtctctcctgaatcaaccttaccttttccaaggcatcctttaccaaatcagtaatgtataacttagcctccccaggctcaaaccatccgatgggagaatgacatcgccgaccatataaagcctcaaatgaagtcatctcaatgctggactgataactgttgttgtaagcaaactcgaccaagggcaagaactgatcccactgcactccaaagtcaatcacacatgctctgagcatctcctccaatatctgaactgtccgctctgattgctcgctggtctgttactggaattctgtgatgagctctacacgggtgcccaactcactcagtacgactctccagaaatgcaaagtgaactgaggacctctatctgatatgatggacacaggcacactgtgcaaccgaactatcttccgaatgtaaatctcagccaacctctctgaagtttaagtagtggctactggaatgaagtgtgccgacttggtcaacatgtcaacaataacccaaactgcatcgaaccttcgcaaagtccgtggcaacccaactacgaagtccataatgatgcactcccattacttaggtatagtcatctacttgagtaggcctcctggcttctggtgctcatacttaacctgctggaaatttaggcacctagctacatactccactatgtctttcttcatccgccgccaccaataatgttgcctcggatcacgatacatcttcatagcacctggatgaattgaataccgtgaactgtgtacctcctctagaatcctctcccgttggacatcaacattaggaacacataagcgaccctgaagtcgcagaataccatcctcgctaataaaaacctctctggcaccaccctgtagtaccgtctctctgagaacttccaaatgagggtcatcaaacttccgtgccttgattgccccaataatgaagactgagcaacaacacatgcaagaactcggttgggctctaaaatgtccagtcgcacaagtctgttagccaagaactgaatgtccaaatctagtgtcctctcctccgctgaaatgaatgccaagctacccatactctctgccttcctgcttaaggtatttgcgaccacatttgccttgcccggatgataaagaatggtgatgtcataatcctttagtaactccagccatctatattgcctcaaattgaggtccctctacttgaacaagtgctgcaaactgtggtggtctgtgtaaacctcacaagacaccccatacaagtaatgtgtccaaatcttaagtgcatgaacaatcgctgccaactccaaatcgtgcacggggtagttcttctcatgaatcttcagctgacgcgaagcataggcaataactcgtcccttctacatcaatacacatcccaagccaacccgtgaagcaccgcaataaactgtatacatcccctaactggaaggcaacactagaagtggggttgtggtcaaagctgtcttgagcttctgaaagctcgcctcacactcgttggaccatcagaatggggcacccttctggatcaatctagtaagaggtgctgcaatggatgaaaagcccttcacaaaccaacgataatatcctgctaaccccaagaaattcccgatctcggtcgttgaagtaagatgaggccaaccctgaactgcctcaaacttcttggaaccaccttaataccccctcatgatacaacatgccccaagaatgccacagaatccaaccaaaacttacacttggagaacttagcatacaacttcttttcccctaaagtctgtagcactactctcaaatgctgctcgtgctcccccgggctatgtgagtagataaagatgtcatcaatgaagacaacaacaaaggaatcaatataagtcctgaacaccctgttcataaaatacataaacaccgctggggcattagtcaagccaaaggaaatcacaagaaactcataatgaccatatctagtacggaaggaagtctttggaacatctgagtcccgaatcttcagctgatggtaccctgatatcaagtcaatcttagaaaataccctagcaccctgcaactagtcaaacaaatcatcgatgcgcgacaaccggtacttgttcttgatggtaactttgttcacctgacggtagtctatgcacatccgtatagtcccatcattcttcttcacaaacaacactggtgcaccccaaggtaatacactcggtctgataaatccctttgctaacaactcttcaagcttttctttcaactctttcaattctttcggagcatacggtatggtggaatagatataggctgggtgcctggagccaagacaatgcaaaaatcagtatcatgatctggcggcatgccttgaaggttagaagggaacacatcgaagaactcccggactactgtcactgaatcaatcatcggagactctgtggtggtgtcccgtacataagcttgatacgccaaacaacccttctcgaccatacgttgagcctttagaaaagaattaacctgactagctgtactaactgaggaacccctctactccaatctcggtaactcgggctttgctaaagtaatagtcttggcatggcaatttaggatggcgtgatatggggataaccagtccatgcccaggatgacctcaaagtcggtcatatcaagtaacgggagatccgctctagtctcgaaaccacataatgtaaccatgcaagaccgatagatctgatccacaaccatagagtcacccacaggagtggacacataaacaggagtacccaaagactcacgaggaatatccaggaaatgagaaaacaaagatgatacttatgaataggtagaccctggatcaaataatactgaagcatccccacggcatctgaggccaatgcattgggtctggccggaaaaacatagaatctagctggagcgccgactggttggcctccacctctaggacgacccctaccaacctgtcctccacctctaggcggccggacagtcagtgcggtaatcatgggttgatgatcttactgcattgcctttcccgaagtctggggcaagtcctcttcatgtgacccgaatctccacactcgtaacaacctctcggaaccataactgtttccctgaagactagccccgatggcctgaatacccactagaggaactctgaatggctggtggacgatatgaactctctggcatggcaatgaaataagcactggaagaaccctgatgaccagaatacccgccggaggaaccctgaatagctggcgggcggtaagaactctccgacatcgcactgaaataaggcctcactagagcacctcgaggaggtggtgggggtgctgaatatggggccctgcagggctggcccctccaaactggcctcaaggcctagcaggggcacctctaaactctctagagaatcaggccctcttgtcgttatgcgtctactctctacctctcaaatggtagccctcaatcccttgagaaatctcctttaccagctgataaggggtccccatctcaacctctcaggccatgttggccctaatacaagagtgcaaccctgcaacaaacctttgcactctctctgcgtcagcaggaagtatcataagtgcatggcgggacaactcggagaacctcgcctcataatcggtcaccgacatctgaccatgctcaagattctcaaactaataccgcaactcttccctctcagagtgcggaatgtacctatccaagataagctgtgtgaactagcctcaagtaatgggaggagaacccgctggtttgccaagaacataagacttccaccatctacagtccctgccctccagttgaaaagtagtgaagtcaactctatgagactccagtgtcctcatgttgtgcagtttgtgcctgcacctatcaatgaaatcctgagcatcctcattacgctcacctccaaagacaggagggtgtagcctagtccatatatcaaataacttctacgaatcatcgttcgcagctagtctgggctcaggtgctactactgtaactggctggggcccatccgcgggtagtgtactcagagtctgatataccgcagctgcatgtccaggagccttggcagtaggggtctgtgccccccctcccgcctgagatgtggccgggtccgctggaaataaaccatcctgagtcatagtatccatgaaccgcataatacgaaccataacctcctgaaagcccgacgccgtcatgaaatccaccagggaaggctctgctgcgggtaactcgccttgatccgcaactataggatcctcttctatatccgatggtggtgcaactggggcagctctgggacgcctcgtcccctaccttaggtcggttccctcccccggtctctacctcgacctctagcaacagggagagaagctcctcccgggtttggaacgtcagtcgtacgcgtcctcaccatctgtgagagaatagagaaggaaatttagtacaccatcaactacacgatagaagatgaataaagagtagagacgtctccataccgatccgtaagaccctattaggccagcccatcacttgtgagacctacgtgaacctagggctttgataccatgttttcacgacccaatttccattataggtcgcgatggcgcctaaaactgatgctaggcaagccaacactaatcaactagtgagttctaatttattttactaaacatcccaaacatctacttaacttaaattatagaatgcgataaataacgaatgattaaggcaatttaaactgaagtgaataaaagaggtcatgattttaggattacaacccaaaataatagtctactaatgtgtgtgccaggaactagcgtcacaagtatgtgggcatctagtagaatgtataaaatataactatcctactgcctgaaatagaatagacagtaaataacaaaaagagagactctaacacgctgctgaacgacatcataaggggcagctcaccgtggaatctcagtcaagtatcaggaacgtgcaccgaacgggtatgtcacgacccaacctatgggccgcgacgggaacccggtaccttactcaaccgagtaccaacataacatatctttcttatcatactatcatgggtaattgggccaatagggtcatcatgacgtaaccgaaataaaacataaggaaatgctagatataggacgacttaacatgatatagaaacttatacatgtgacatacggacctataaggctcacatgatcactcgtacactgaacataggtcgacaaggccaaacaatcttttacgtacatgaaatatgtctacaagcctctatagtacataaacatcataaggccgaataataattatcagttttcaaagaactgtagtaaaagaagtagcgagatggtatcaaaatatagtgactttaaagacataaaaagcaaggattcgaaatggcgcgattttgagcagaatgaggcatcttttgaaatcccagtagtttgaaaacataatagaatgggaatcagtaagatcagtaaaagaagatagatgcacaacttagagactgtttaaaatagagcaggagttttagtaaaagtaaaatgcacttcagtgaggtaaaacaggagtgggagcagtagggttcaaaatgtttaaagagaactgattaaactagtggaacataattgatttgatttaatgcatatcaggactaaagtttgcctaggcgttgtatgcattgcctacttattttaagagggtgagcatgcatgtttggattatgatttaaatagatacctgtttgtaggaaattgtttcaagtagattaaacatattttatgggagtattagatcatgttaactaggcgctcaagttatgataaacaagaagtcctaagggaaggatatcttatgcataaattatcaccttaagacatggtttctatatgtcatgtttacaaaatgcatgagcaatacattatgatagccttttgttactcatttagttatactaggaacatggtgtcagatggcgtgaatataatagatatgttgaaatgaagcacctaagcatgattttaatgtatggtatgcatgtcctaagcatgatactattgcgcacatagggaaataaagcctagtcatgatttctacccatactacaccaaacatgcataattccctcccatattcactatccagtcccaatcgtttgtttacaaattattacagaccatagcaaatgaattacagtaattgcaaagagaaaaataagaagttattctatagagagccttcaaacaggcccaaccttccagcctcacccctttcgagcttcacagccttacatagcctgggtgcggcaaagctccaaaaggtcgttgtgagggccctggccaataccagcacccaacaattgccaaagttgagataggtgcagtgtagaattacctacctcagtgtgtcaaagttaagagggaactgaaggtccctaagcaatgctcacactgagggggtggaacctaaaggtctaagagtagtgtgaagtgcaggaaggagtagttaaaaagagttgagtttgaaagggagttttgaaataacctggcttagaggatactaaaaacagtttgaaaaggaagcaatagaatggtcacaactcagcaggtatgcagaattcaagaaagcaaacacaaataggggaaagggattgaggacaagtaatggtggcagcatatttgcagtaattagtccttaaaacaaatgagtagttatgtgatggttggctgttccgaccgggttacctgcagatagagaacaagcgtatattgtgcataacatgatgcaagttcccgtcggactatgaatgctatctttggaccatcaggatgatgtcctgggccatgaatcgctcagcgcaggattcgcaggctatgaaatgatgttctcgggccatgaggatggtgcctctgaacgatgatgcctttgaataattatatgcaagttgaatataagagatccgcaggctatgaaatgattttctcaggacatgaggatggtgcctctgaacgatgacgcctttggacaagttggcgatatttcagcccataaagaatgcagtaatatgatgttggcaccacagaggttagtcttgcgatttgcgaaaagaaagtgggcagagcttagcccgaaataaggcgtaaataaataaggtgattgctttgaaaaaggtataaatgagcttagcgtagtgcaataagatgcggagagaggtggcatagaacctcggaaggcggaatgatagccttatgcaatgcaggaaataaaatgcaggggaggtagcgcttaacctcggaaggcataataggtagccttatgcagatgcgaatgcagatggaggtagagcttaacctcatgcagacggagacaaagcttagtctcggaaggcagaatggtagccttatgcagagatgcaaatgcaaatggaggtagagcttaacctcatgcagacggagacagatcttagtctcgagaggcagaaaggtagcctgatgcaaagatgcgaatgcaaatggaggtagagcttaacctcatgcagatggagacagagcttagtctcgagaggcagaaaggtagccttttgcagatgcgaatgcagatgtaggtagagcttaacctcatccagacggagactgagcttagtctcggaaggcagaatggcagccttatgtagtgcagaaaataaaatgatagtaagagttcttagctgatgatgaagtgtgattgttgtgaatgaagtatcatttgcaatgatgataatagtaagcgttggcatgtgcgatgagctcgagagcatatccttgagaaacatgcgtcttttggggataatgagatgtcttgggctttgccgtatttgtgcctgcatccaaagaaaaatcgtgagttccattaggggagagggttagttcgtatccctgctggctcggatcggcctatctgcttgatgatgatggctttgtttgtaccacagaggtagcgttgctaagacaagctgtttttaagaaataaatatgcatgcttttataaaaatatgatataacatataataaaaaataattttcttcggatgaaccgacgaccatgacgcggttcgagacattacaacgcctcttgctgcgaagatttgaggatcctcctcaacattttccccaatttgatgggtgaaggcttctagttgttactgctgcggtgtttggttgaacttgcttcggaattttgaggtccctcctcaaaattctgccctagtttccattcgtgggggaaatgaaaattttattaaaatatgaccgaacccatagggctgcctacgtatctcctcttaaacgggaatcaggtcaggcgtaattcaatttacagcattgatataagcataacaattacacatagtagcgcttgactgcgtctgagttgattggtttaggccaaatttctccgtccatttctgccagtatgagtgctcctcctgttaggactcggtgaaccatgtacgggccttgccaattgggagagaatttcccttttgcttcgtattgatgaggaaaatttttctttaataccagctgccccggtgtgaatcatcttggtttgactttcttgttgaaggctctagtcattctattttgatatatctgaccatgacaaaccgcgttcatcctttttccgtctatgagagccaattgctcatagcggcttcttacccattcggcgtcgctgagcttggcttcttatataactctcaaagatggaatttcaacttcagcaggaatgacggcttctgtaccgtataccaacatgtaaggagttgccccggttgatgtgcgaaccgtggtgagataccccagtaaggcaaatgacagcttctcatgccactacttgtgcttctctatcatctttctcagtatcttcttgatgttcttgttggcagcctcaacgactccattcatttgaggtctgtatgctgtagaattcttgtgcttgattttgagggcttcacgcattactctcatcaaatcactattgagattggaaccattatcggtgatgattgactctggaataccaaaccgacaaacaatgcgatcgcggacaaaatcggccacgaccttcttagtaactgctttgaacgatgctgcttcgacccatttggtgaaatagtcaatggcaaccagaataaacctgtgtccgttggaggcggcatgctcgatcagtccaataacatccatgccccaagcggcgaacgaccagggtgaacttgttgcattaagctcactgagaggtacctttatcatatccccatgtatttgacatcgatggcatttgtggacatactggatgcagtctgtttccatggtcatccagaaataaccaacccgaagtatcttctttgctagaataaacccgttcatatgaggaacgcatgtatgtatttcctccaacaactttgttgcttcctctgcctcgacacatcttagtaaacgcatatcgggagtcctcctatataggatttctccgttgtgaaagaagttgtttgataaccttcaaaaagtgctcttttgagtagcgtttgcaagttccgggtactctccctctgccaagtactccttaatgtcatgaaaccaaggctttccatctgcttcttcttcaacgtgggcgcagtatgccggttgattgtgaatccctaccgggataggattaatgaagttctcatctggatgctgaatcatagatgacaaggtggccagtgcgtcggcgaactcattctggattctaggaacgtgccggaattcaatctttgtaaacctctttctcaattcctgcacacaatgtaggtatggcagtatcttggaattcttggtcgcccattctccttggacttggcgtattaacaagtatgagtcaccaattactaataattcctgaacattcatgtcgatggccaaattgagcccaaggatgcaggcctcatattcagccatgttgttggtgtaggggaacctgagtttggcggatactgggtagtgctgatcagtttctgaaattaagacttctccaatacccacgtctttgaagtttgcggccccatcaaagaacatcatccaaccgtcgtaggattctgaaatgtcctctcctacgaatgacacttcctcatcggggaaatacgttttcaatggttcgtattctccgcccacaggattttcagcaagatgatcggctaatgcttgtcccttgaccgccttttgagttacgtaaatgatgtcgaactcacttaacaagatctgccatttagctagcttgctagtgggcatggtgtgatgacccaaaaggtcatcctgaataattccagttaaatttgtatttcgaggcctcgaaagcctccgttaatctcacctcggtatgtgtgcgtagcccggacaggcagccgggaaacttccatgtaaaaatttgataaaaatgggatttttgaattgaataattaaataaagttgactttgatgaacatttttggtaaatggatccggacccgtgatgtgacagtcccggagggtccgtaggaaaatatgggacttgggcgtatgcccggaatcgaattccgaggccccaagcccgagaaatgaacttttaaagaaaatagttttctgaaaatattaaaggaatgtgaaagtgaataattatgtgaaaatcttgttaccgggcccgtgttatggttccggatcccgaaacatgtttattatatgttgtttgccctatctgtgagttttggtgtaaaacgggtttgatttgattggtttcgagtccaagtgaggaaattggagttaatgaacttgtgaggtttctaaagaatttgaagtgtggtttgagaagtgattttatgttcccgaggtccaaatgaaattccgagaccgggaatagttcccttgtgtcgtatataacttatctgcaaaatttgaagtcattccgagtggtttaggccggttcgacgcgttaaagtgaattctagaatttcaaagttcttaagttttgaattcaggggttttggagagcgattttgagttttagcgttgtattgagtgttccgtgagttcgagcaagtccgtttaatgatttgggacttgttggtatttttggacgggggctcaagtgggcccagctgcctcccgaacctcgtgcgaggccaaaaaccagcaaaaaccactgctggtgcacaacaactggtgtgaccgcaggtgcggttgcccagctgcaggtgcgggaccgcccctgcggtcccagcctcgcaggagcgaactccagcccccttgcccaagtccgcaagcgcgagaccgctggcacggtccaagccatcacaagcgcgaccctttccgcaggggcgaccagatttccgcaggagcgggaccactggcacggctccaaaccccgcaggtgcgagcccagggtcccaggcatttttctgtaattgtgatcctttttttgcaggtgcgggaccacacctgcggtcctatggtcgcaggtgcagaaacccctgttggcagcccacttaaatactccaaaatttcgggttttcctcattccttccatcttcaaactccattagaggcatccaagcttggggcatcaccttccacgaccacccactgtaagaggtaagtaaaaccccataaaacttctaattttaacaataattcctagcttaattcactaataaaccacctaaaatcattgattaggtagtaaactttagggttcttaggaatttcgtgattttccatgttaggccataaattcttgaataaattacataacttcgatccttagactccgggtaagtgattccttcatgatttttcaaaaatctaaacgtgtgggcccggggtggaattttagtattcttggaaaaatagtaggaaatgcataacttggcttagaaattgatttgagtacttattgatgtacttgggttgattatgtctagataataccgttccagagttgggttctaaaggaaaggctgtgatcgaggcttgacttgcaattttggagccgaggtaagtgtttggcttaacctctgcttgaggggtatagagtcttatttgttatgtgcaactcatgtccaacatataggcgtggtgacgagtgcctatgtgttgcggtcaagtatgctcgtgagtcaattgtgatgagattttgttatgttcctaatattccccgtactatgattaaattatgaattaaaactgatacttgatgttgtttcatgacgtggagagttattgagttatttgttccagttgaggcttacactgttgagattgtatttctgatgcgaggttggttatagctgagacccttgtcgggcatttgttgatattgaaattgatgaattctccttgctgggacaagggaattgtattgaatatttccatgcactcgaaacttcgtattgttgactttcacattattgttgccttgtatttttattattcgtcgcacgaggggacattccgtgccgagtgattgtgaggttatgcacgaggggacattccgtgccgagtgttattatatatgcacgagtggacattccgtgccgagtgattgtgaggttatgcacgaggggacattccgtgccgagtgttattatatatgcacgaggggacattccgtgccgagtgactgtgaggttatgcgcgaggggacattccgtgctgagtgttattatatatgcacgaggggacattccgtgccgagtgattgtgaggctatgcacgaggggacattctgtgccgagtgttattatatatgcacgaggggacatttcgtgccaagtgactgtgaggttatgcacgaggggacatgtcgtgcctttcctgttcattatatatttgagaagctatatttcttccttgcctttacgttgcatttattaccttgtactgctgtgttggcacactgttaccctatctccctagcatgttctccccgtatctgtcgcacttgctatttccattgccatttttccggttattatataaaattgcacaggtacacatgtagtgttggtcctagccttgtcactacttcgccgaggttaggttcgacacttactcagtacatggggtcggttgtactgatgctacacctgcacttctttatgttgtgcagactacgcagccggacccggagatcactaacgatcaaagcatctcattcagtcacccaggagactcgaggtagacccgcagacgttcgttggcctggacgtcaccttctactttccactttcagctctgtcttactttgtatttcaaagacaaccttatgtatttatttcagacctattgttgtagtaatctcttagatagtccgtgagtatgtgacactagttatgggatttgtttatgggtttcatttcgaaagtgctatgttgtattttagttatcttgttcatatttgttgttaataagttttaattacttcgacgttggcttgtgtagcgggttcaacgttagacgcagtcatggcccgaaggtgggatttcgggtcgtgacaagttggtatcagagccctaggttgcttaggtctcacaactcacagacaaacttggtagagtctgagggatcggtacggagacgtctatacttatcccccaagggctgcaaagtaggaataacttcacatctttcattcactgtcgtgccaattggattctgaatgctaattgagtctctattttactctctcgcagatggcgaggacgcgtgcttcctcatcgaccgaccagcagcctgatcctcctaccacagctcctacgaggggccgaggccgaggccgtgctagaggccgaggccgtgctagaggccaaggcagagctagggcagcagctttagtagaggacccacaggtagactttgccggtgaggttcctactccgacagtcccagttggaccgactcaggtcccagaggggttcattgccaccccagtacttcaggacgctctagtccgcttagtgggactcatggagagcgtggctcaggccggtcttcttcctactgcaccatctggatctcaggctgggggagggacacagactcctgctattcacatggcagagcagttttccactcagttccagactccggcacctcagatggctggagtagttcagtcaggtattatggcaccagcagctgagggagcagccatgtccgcaaatgctctgtggagattggatcggttcaccaagttatttactaccacatttactggtgcaccatcagaggatccccaagattatttagacagctgttacgaggttcttcggaacatgggcattgtggagtccaatggagtttattttgctacatttcgtctttctggcaccgccaagacttggtggagagattactgcttgactagaccagctgggtctgcacctttgacttggggtcagttctccgagttgttcctgggaaagttccttccagttacccagagagaggatcttcggaggcagtttgagcgtctacagcagggctccatgtccgtcactcagtacgagaccaggtttattacgctggctaggcaggcccttatgatactccccactgatcgggagagggttcggaggtttattgagggtctggctcagcccatcaggcttcagatggccagggagatgggtactgatatctcctttcaggatgcagccgatgtggccaggcgcattgagatggtattatcccagggtggtggtcaggggtctgataagagacctcgtcatttcagccgtttcagtggtgcctcatctggaggcagagattcctttggcagaggccatcctcctaggccttatcagtcggcgctccaggtatcctgtagtgcacctgtagcttccatcagtgcaccgccgatccagagctaccagggtggtcattctggtcgacagggtcagttctagggtcagtattctcagcagacgaggtcttgcttcacttgcggtagtacggggcatatttccaggtttttgcccccgaggttttggtgggtctcagtatcagggttcccgtgccatggttcccgcatcaggtgcaccctcaccccctcagccagctaggggtggtggtcatggtgccagaggtggaggtcagacgcatagaggtggagggcaggccatgagaggtagatgccagcccgtagcaggtagacctagagatatacaggttggaggggctcagcccggtgttatgcttttcctgctcgtccagatgctgaggcttctgatgcagttatcacaggtacagtttcagtttgcagtcgagaggtttcggtgttatttgatccaggttctacattctcctatgtgtcttcatactttgccccttatttgagtatgccacgtgactccttgggtactgttgtacatgtgtctacaccggtgggtgattctatagtggtagatcgagtctaccgtgcttgcgtagtagctattggtggtctggagactcaggtcgatcttttgcttcttgatatggttgactttgatgttatattggggatggattggctatctccatatcatgctatcatggactgttatgccaagacagtgaccttggccttaccaggtgtgcttcgtttagagttgagagggacccctagtcattcttctagcagggttatttcttatatgaaggctcggcgcatggtcgagaagggttgtttggcctatctggcctatgttcgtgattctagtgttgatgttccttccatagagtccgtgctcgggttcgtgaatttccagaggtattccatgttgacctgccaggtatgccacccgacagggatattgatttttgtattgagctagctgagggcactcagcccatttctattcccccgtatcgtatggctccgccagagttgaaggaattaaaggaacaattgctggatttgttgggtaaaggcttcatcaggcctagtgtttcaccttggggtgctccagtattgttcgtgaagaagaaagatggctcaatgaggatgtgtattgactaccgacagctgaataaggttatagtcaagaacaagtatcctttgtcgaggattgatgacttatttgatcagcttcagggtgctacggtgttctccaaaatagacttgaggtctggttatcatcagctgaggattagggcttctgatgtgcctaagacagcttttcgcactcgttatgggcattatgagttcttggtcatgtcgttcagattgactaatgtccccgctgctttcatggagttgatgaatcgggtattcaggccttatctggactcctttgtgatcgtgtttatagaggatattttggtatactctcgcagccgagcggagcataagcaacaccttcgagtcgtcctccagactctgagggatagtcagttgtatgccaaattttccaagtgtgagttttggcttagttcagtggcatttctgggccacgtggtatcggcagagggtattcaggtcgatccgaagaaagtttcggtagttagagattggcctaggcccacttcagccacaggattcaaggtttcttgggcctagaaggctattatcgccggttcgtggagaggttttcgtctatagcagcccctatgaccaagttgacgcagaagagtgctcagttcagatggtcggaggaatgtgaggcgagctttcagaagctcaagacagcattgaccacagcaccaatgttggtactgcccacatgttaaggttcttataccgtgtattgtgatgcttcgagagttgggcttggtgtagtgttgatgtaggattggaatgttatagcctatgcttcacgccagttgaagattcatgaaaagaactatctagtccatgatttggagtttgcagctattgttcatgccttgaagatttggaggcactatttgtatggggtaccgtttgaggtattcactgatcacaagagtttgcaatatttgtttaggcaaaaggagttgaatatgaggcagaggaggtggttagagttgctgaaagattatgatgttactatcctctatcatccaggaaaggccaacgtggtggccgatgctctgagccggaagtcagtcagcatgggtagtttggcttatctttcagtgggagagcgacctttggctttggatgttcaggcgttagccaatcgatttgtcagattggaggtttccgagggtggcagtgttttggcccataccatcactcgttcttcattgtatgatcgcattcgcgccaggcagtatgaggatcgtcatttgtgtgctcttagtgatgcggttcggcacggacgtgccaagcaggtcacagttgatgctgagggagtcttgaggttgcagggttgcatatgcgttcctgatgttgatggcatacatgagttaatattgcaggaggctcacagttccaggtattccattcatccgggcgccgcgaagatgtatcaggacttgcgacaacattattggtggcgcagaatgaagaaggatatcatggcttatgtggctcggtgcttgaattgtcagcaggttaaatatgagcaccagagacccggtggtttgatgtagcagattcagcttcccgagtggaagtgggagcgtatcacgatggattttgtagttggactcccacggactccgaggatggttgatgcagtatgggttgtggtagataggctgaccaaatcagcacatttcattccgatggcggtttcatcttcagcagagaagttggctcagatctatattagagagattgtcagattgcacggtgtgtccttatctatcatatcagaccgaggtactcagtttacctcccatttctggagagtgtttcagagggagttgggcactcacatagaattgagcacaacattccatcctcaaacggacggacagtccgagcgcaccattcagattttggaggatatgttgcgggtatgtgttattgattttggtggttcatgggaccagttcttgcccttagcagagtttgcctacaacaacagttaccagtcgagcattcagatggctccgtatgaggcgttgtatggtaggcgatatcggtctccagttggatggtttgagcccggagaggctagattattgggttctgagttagtccaggatgccttggataaggtgaaggttatttaggataggcttcgtacagctcagtccaggcaaaagagctatgcagatcgtagggttcgagatttggcatttatggtgggagaccaggtattccttcgagtgtcacctatgaagggcacgatgagattcggaaagaggggcaagttaagccctaggtatattggcccatttgaagttttagataaagtaggagaggtgtcctacagacttgccttgccaccccatttatccgcagtgcatcacgtgtttcatgtatccatgctccggaagtatattgcagatccatctcaagttcttgatttcaccggtgtccaattggacaaggatctgacttatgaggaggagccagtagccatattagataggcaagttcgccagttgagggcgaagagttatccttcggtccgtgtctagtggaggggtcagcctgccgaggcatctacttgggagtccgagtccgacatgaggagtcgttactcccatcttttctcagactcatgtactttactatatccggtcgaggacgaacgtttgttttagaggtggagattgtgatgacccaaaaggtcatcctgagtaattccagttaaatttgtgtttcgaggcctcgaaagcctccgttaatctcacctcggtatgcgtgcacaacccgggcagtcatccgggaaacttccatgtaaaaatttgataaaaatgggatttttgaattgaataattaaataaagttgaatttgatcaacatttttggtaaacggatccggacccgtgatgtgacggtcccagagggtccgtaggaaaatatgggacttgggcgtatgcccgcaatcgaattccgagtccccaagcccgagaaatgaatttttaaagaaaatagttttctgaaaatattaaaggaaagtgaaaatgaataattatgtgaaaaccttgttaccgggcccgtgttatggttccggagcccggaacaggtttattatatgttgtttgccctatctgtgagttttggtgtaaaacgggtttgatttgattggtttcgagtccaagtgaggaaaatggagttaatgaacttgtgaggtttctaaagaatttgaagtgtggtttgagaagtgattttatgttcccgaggtccgaatgaaattccgagaccgggaatagtaccgttgtgtcgtttataacttatctgcaaaatttgaagtcattccgagtggtttaggccggttcggcgcgttaaagtgaattctagaatttcaaagttcttaagttttgattcaggggttttggagagtgattttgagttttagcgttgtattgagtgttccgtgagttcgagcaagtccgtttaatgatttgggacttgttggtatttttggatgggggctcgggtgggcccaggtgcctcctggaccccgtgcgaggccaaaaaccagcaaaaaccactactggtgcacatcagctagtgtgaccgcaagtgcggttgcccagccgcaggtgcgggaccgccactgcggtcccaacctcgcaggagcgaaccccagcccccttgcccaagtccgcaggcgcgagaccgcaggcgcggtccaagccatcgcaggcgcgaccctttccgcaggggcgaccagatttccgaaggagcgggaccgctggtgcggcttccaaccccgcaggtgcgagcctagggtcccaggcccttttctgcaattgcgatacttttgtcgcaggtgtgagaccgcacctgcggtcctatggtcgcaggtgcggaaacctctgttggcagcccacttaaatactccaaattttttggttttcctcattccttccatcttctaactccattagaggcatccaagcttggggaatcaccttccacgaccacccactgtaagaggtaagtaaaaccccataaaacttctaattttaactataattcctaccttaattcactaataaaccacctaaaatcattgaattaggtagtaaactttagggtttttaggaatttcatgattttccatgttaggcaactcatgtccaacgtataggcgtggtgacgagtgcctatgcgttgcggtcaagtattcccgtgagtcaattgtgatgagattttgctatgttcctaatattccccgtactatgattaaattatgaattaaaagtgatacttgatgttgtttcatgacgtggagagttattgagttatttgttccagttgaggcttacactgttgagattgtatttctgatgtgaggttgattatagctgagacccttgtcgggcatttgttgatattgaaattgatgaattttccttgctgggacaagggaattgtattgaatatttctatgcactcgaaacatcgtattgttgactttcacattattgttgccttgtatttttattattcgtcgcacgaggggacattccgtgccgagtgattgtgaggttatgcatgaggggacattccgtgccgagtgttattatatatgcacgaggggacattctgtgccgagtgattgtgaggttatgcacgaggggacattccgtgccgagtgttattatatatgcacgaggggacattccgtgccgagtgactgtgaggttatgcgcgaggggacattccgtgttgagtgttattatatatgcacgaggggacattccgtgccgagtgactgtgaggttatgcacgaggggacatgccgtgcctttcctgttcattatatgtttgagaagctatatttctgccttgcctttacgttgcatttattaccttgtactgctgtgttggcacactgttaccctatctccccaacatgttctccctgtatctgtcgcacttgctattttcgttgccatttttccggttattatataaaattgcacagcatgtagtgttggtcctagcctcgtcactactttgccaaggttaggttcgacacttactcagtacatggggtcggttgtactgatgctacacctgcacttctttatgttgtgcagactatgcagccggacccgaagatcactgacgatcggagcatctcattcagtcacccaggagactcgaggtagacccgcagacgttcgtgggcctggacgtcaccttctactttccacttttagctctgtcttactttgtatttcaaagacagtcttatgtatttatttcagaccttttgttgtagtaatctcttagatagtctgtgagtatgtgacaccagttctgggatttttttatgggtttcatttcgaaagtgttatgttgtattttagtagtcttgttcatatttgttgttaatatgttttaattacttcaacgttggcttgtctagcgggttcaacgttagacgcagtcatggcccgaaggtgggatttcgggtagtgacacatgggcttctgaaagatgtacttgagcggatccatccttgatatgaggtatgttgtttaggcgcagaaataatgccttagcttctgtgcgacccaagtcaaagcacaacaggtgcgctctaatagagaataccgagcctcatacggagtaaacttcttgctgaggtaataaattgcttgctctttcctccctgtttcttcatgttgccggagaacgcaaccgaaatctccatctaatacggccaggtagagtaataggggtttatccggctctgggggtaccaagactggtggtgttgagaggtactctttgattctgttgaaggctttttgacaatccccagtccatttggtggcagcatcttttcttagcattttgaaaattgattcacaaatgacaatgaaccggctgatataattttgctgtcccaggaagctcataacatcttttttgttctttggtggcgacaattcttggatggctttgacctttgatggatctagctctattcctcgacgactgataatgaaccctagcagcttgccagcaggaaccccgaacgcacactttgcagggttaagtttcagattgtatctccttaacctattgaagaactttctcagatcttccatgtgatcagcaattttctttgatttgatgatgacgtcgtctacatatacctcgatctctttgtgaatcatatcatggaatatagtagtcatggccctcatgtaagtggcccctgcattctttagaccgaatggcatcatcttgtagcaatatactccccacggcgtaatgaatgtcgttttctcagtatcttcctcgtccatcccaatctgatggtaaccagcaaaacaatctacaaaggactgcagctcgtgcttagcacagttatcaattaagatgtgtatgttttgcaaggggaagtcgtctttcggactggcacggttaagatcccggtagtcgacgcagactctgaccttcccatctttctttggtacaggcacaatgttggctaaccatgtaggatattcgaccactcggagaaccccggcgttgatctgtttggtgacctcctctttgattttcaagctcatgtctggtttgaatttcctgagcttttgcttcactggtgggcatgttggattggttggcagtttgtaggccacaatagaagtactgaggacagtcatgttgtcatatgaccaggcgaatatgtcctcatattccttttagaattccatatattcctccttttctgacggcgacagatgaatgttgatgcgtggttctttgacggtctctacgtttcccaggttgacaacctcagtatcatccaaattggacttaggtatgttctcaaagttctcgacctccttaataatatcctcaggtatatcatcctcgtctgactcgggatccgtttgttgtgttgtctcgttgcaggtcacggtcgtcggttcatcaagataagtaatagtaatgctgtgtaaaatatcgtaatggggaggaaaatagtagcaagtaaatataggatttataaagaaactggaaatgctttgataaattgaataattgtttgaacatgggagctctttcttgcagaaattaaaatttcgaaaaggaagaaaattctttaaataaataaactataaataatgcttgttttgttagccttgctaccccgaggctcgacatgctttggtcgtcctgacggaccaattgttgagatgtgatcccttgttctcgacttgtatggaagggtcttcctccccctcttcttcaagaatgacacagcagtccatatcctcatcatccaaaaataaatcctttatcgctgctaacgcttcctctttgtctgtaccatatatgatgtcagctggctggaaagtccgctctatgcggggtattggctgctccaatgggtagtaggggccgcgccatggtggcgaccagtccctgaactccttccaagtgtactcgtaccctagaccaaaagtagtaccatgcttcttgagtgttattggctttgttattccttgaagatgcttaccgagccctttacccggctcgtacccttgccagttcaatatgctttttgtcttactgcaccaccacttgtctttgtcaacggcgttaacacgttctacgctgtgatagatttctccgcccaacttcctccttccatcgatgaccgaaaaggtctggcgaccatagatatggttgctaccgtctccatgaatgattacctcttggtgattccattcaaacttcacggcttggtgtagggttgatgcaacggccccagcagcatggatccaaggtcgtcccaacagtaaattgtaggatgcgggcacatctattacttggaaatctacatcgaaccaagttggtcccatttgtaagcataaggtgatttctcccatggtggacctttgcgaaccatcgaaggcttttacgttgatctttccttcctttatctcatgtagactcttgcccaatatcttgtgatgaagtgatcctcacattgtacggtgatgtgtagtgctttattatgccctagcccctcgggcggtagctcatcttcgtggaaagtgatcttgtgactttccagtatctagcccaccatgttgtccatttccccactggtgatattgtctggcacgtatgcttcacttagcacccttagcaaagcactcctgtgagtttcagagttttgtaacaaggagatgatggatatctaagctggcgttttgttcaactggtcgaggattgagtattctttggcttgtatctttctccactgatcgtctgaacatgtttcaatgatggggggatggttgtggcctgctttctagattcggccaaatgttcaagggtataaactctgccagttcttgtcataccctgtgcagcgatggcttcttcagacttgcctttacctttctccttgcttcagcggtatagtccaacggaatggcctctgagtaaaagggtgtcgttgttaacattgccactgggatgggtgtggtcattcttattcctgccggagtatatgttatagatggccggattgcaacttcgagcggtcgcacaaattcgacttcgatcggtcctcgggcttttcctttggcgggtggtcttgattcaaactcaagtggaatggacatgtttacgtcaacttcctcagatggctgcatctagaccacgatcggattaagagtaatcgcatccttcttcagatcaccctcgacaattagcccaattgatccctctggatcccaatcatcttcaacctcaatcatgtggactccgcctttatggtcgggcaacggattgttgtgaacattaggatcagggtccttggctataatgatcttgttatctatgagggtttgtatcttgtctttcaaggaacgacattcctcgatggtgtgtcccttcatgctggagtggtaagcacaggttttgtttgggttgacccactgagatgggttctcagggatgacagcggggatgggtgtgacataactggcggctttaagcttttcatataattggtcaatgggttcatctatggcagtatactgttttggtggtcgacggtcgaagtttgggcaaggtctcgggaagttttgacgattaggtggtgattgatagtgaaaaggttgagaatattaggcattatagacgggagctggttgtgagtatctgggcgaggtaggctgatatgtggatggtggattttggtaggtgggtgagggtgtctggtattgaggtgaaggtgcttggtaacttggagctggttggtatgtgaaggaaggtgtggggtatacttggtatttgggaggggacttggcttgttgtgccaccatcacggctcctacatcccttttcttggacacaccaccggattgcagagctttattggtagcctttaaggctgaaattagtaaccataccgtttttgatgccttcctcgattcgctttcccaaattgatgatatcagaaaacttgtgcccattgaccatcatcagccgctcatagtactgaggatcctgagcgcgcacaaagaatttcttcatttgttcttcttccaaggctggcctgaccttggcagcctctgacctccaacgagtagcatactcgcggaaagtctcagttggtttcttcttcaagttctggatgtagaacacatctagtgcattctctgtgttgaatctgaatctatccatgaagtcggtagccatattcacccaattgatccatttctttggatccttattgatgtaccaggatagtgcatcacctttcaaactcctcataaagagtttcatgcggatcctttcatcttttcccacgccgaccaattttccgcagtaagtcctcagatggactctcgggtcactagtaccatcaaacatctcgaacttaggagggttttacccctcgagcagttcaacatcgggctgtatgcaaagatcctcataattcaatccctcaacccctttaattccttcgacgccctgaactcggttggtcaatttcttgagttcctctgccagattcgtggtgagcttgtccttctcgtcggactcataagtatgcggtgtggaatgagctatggtttccacataaatggggttgtcataagcctggaggtggtctctcgtctgatcctggagaggcggagtgttgtggtgacatgtgttgcgtggtgctggtgaaacgggatctttggggtgattgggttgttttgggacattttggggtaaagtggggttcagagtatttgggaagtgaacgtctagaacgttgagggagaatgataagtgggccaaatttttgacttggtcaagttcctcttggaacttcagcaacttcttctctagtggggacataccctcgtgcagaacctgaataccctgaccatcagtgatctcaacctgttcattcctgttgtcttttctagtaccgcttgcattttccatcttagttttacccttgctttttactttgggaggactgggaggaggagtaggaggagggccctttgatctggtgcaataagttgttgatgccagagtgcacgaactaacctttggggaaggggaataactaacaaaaaaggcagtgaagttagtgaaggttataaagaatatggaggtaatttaaacacgtaatacgaaagtgtaaaacgcatcctaagttggggaacctcttgatgcccgaggtaggcctaacgacaaattaatttagagagacttaaatactaaatgcctaattttattgatgataaaatagacaaagccagcttgactctaaaaatacgaaaatgtaaaatgttactaatggccaagggcctcattacatcaaaatcaaagtaaagacaaatcctttctatttggtctcagaaggaccttccccagactcggcacctctacttgccttgatcaacgttcccatcttgcggagtcccagcagtaagtaggtcttggctagaaatcctacttcagttccctcggtcttttgacaagtctcgatcctcctaaggaacttttcctccaagtcaactatgtctcgttctaagtgtgctagcatctgggtggaactgatggccatgtccttccattcctcgatcagctttttgtttgctatgtggattttgtgatgatcttcttcacagtcatggagccttttgcgaagctggttgagcctagttgttgcctcggctttctcatctatgaccctatgtcctcgagcgaaccctggctcaatacttcctccccagttatcttccaaccatcccagatagtaaggagagcaaccagcgtgatacctgtcaggctcgatagtatccttctccaacctgatcctgcagtgccacaattgctgagcttgacacttgtgagagctgtcgtcatttttgaagtccgccctgagatgactcattttctcgacccttgggacgacttgcttccttcctgcctgcctcatgactcgaatcgggacgtaagggtacgtccctctaagacgaatcaatatcaggaaatggggtgtctctagtccgaatgatgaattcgtcggtcgggaaccactcgaacatccattggatttgttcctcggtcagatcatccaataactcgacccatccattggcattctatggctgtgcaaacatgtcggggatatagttcatacgttttggatgatggaaagcaatatgatcatcccaaactctcctatgtatgtcttgacggtagtcacccctttgcaaatgctcgatgagccaaagctgaagtaacaggttgcaaccctcaaaatgtttcgctcctcgttgacagttctccaaagctcggtatatgtcagcaacaatcataggtacaatgctgaaatcctgcccgtcgatcccttccatcagagtcttggtaaccatagccaatctagtgtggattctccccttctttgtcgggaagaccattaatcccaaaaaacagaatatgaatacgaatacacggcggtgaatgtgtcctagagaggtgagggcgaactcttcctgatatgtgcggtaagactgactacggccatacctctcagataaatagtcaaaaaggggatgtacgagtcttccaagcagactaaatccagattcttcttgagtcccatcattttgagaaaccccggcctgttcggtttttaggcatcaataacccttgagactccaaggcaaacccgctaaaccccttatctcctctagcagcggtgtcatctcattgttcccaaatcgaaaaaccgatcgatcacaatcccagaaagatggaagcctctatcatcatgttattaggctgaatgtccaaaagagagggcaagttgcctaggtgttttctgactgctgttttgtcgcttgaattcaagtcttcccaccagtttagaagttttggatggatgttggtgatcatgccaaacttggggacctcgtgcctcatctctgcaaaataaacaggttaggcccttacccccaccggactcgactatttaacatcaataattagcaatgagcatttaagttctccaaataaatgcacaaaaagtgaaggcgtccttttgggttccagggaaacccaatggactttggacgaggctatcttaaaggctattgtgcggacaacacgttagcctggctaggttgaccatgatgcatgcaacatataatagagtaaggtttctattggggttttagactggtacctttgagcggacaactcaagggggaaggcacggaacagtcgactgcaccgctgatcgactagttttacctcaaatacgccttttcgaatttaggggtgataatactggaatagcgcaaccactcattgtaagcgttgctataggatttgtttggcacgagtggaatatgaatgcagagcatgatatgtaataataagcattaaaatagataggcacgtattttcacgttgagaaaaacggtaaagaaaggaaatacaacagttataatggaaagcggttacaaagaaaacatgaagatatgttagttacattcgggtgaaagaaatacttgtaaaagtaaacaattaacagcatataacggggaataggaaaaggcataagcttttaaatgcaaattaaaggtccaaatttacaaagcaaattgtaatggtataagcctagggaagatccccagcagagtcgccatgttgtcgcgccccatttttctatcgcacgggttaggtatggagagatcgagttaatgacattttggacaactccttaaaagaaagggtttaaggaagagtcgccacctaacgatttttatggtgtgttagggcacctagagttgataactcatgaactagttcgcgttaccagagattgggtaagggattgaaattatcccaaggggaaggtgttaggcacccctcaagatccacaactgtgggtcccagccaataagttttgtgaatttggacggtgaacaagtaacaagtaaggttcatataagaggggatttcaaacaagtttaaaattcttttggagaaagtataaaataaacatttgaaaagaaattgtcctaggtttaaagtaatacggatcacttcaatgaaatacccggtatgtcacacctcgaagaggcggctacacgtggtattagcgcaccagtcatcatatccgtattctacccttcacactccgtaaaggttgttaaaaatgcgtgtgttggtcacgaatgcttattgcgtgccattacccatcccatcctataagtcctggagggtgtttaggactactaatcctacaaggcaggaactaggctgaacccttaggtttaacggacaaaatactaggcgacatacaaaacaagtaggactgcacatatgaggggacacataaagacaaagaaaggctcacaaatccctccacacatagacatgtaagtagcacgtctcaaacatgattaaagtctcaaaacagaagttcaaaatagggattttagaaaaataggtcgtaagaatctggtttagaaaacttaatgaagactgaaactttaattaagactgatagttgatttcaaaatatacagtagctaaaggtagcgacaaagttagaaacatgcggtgatttaaagctttcagtgaacatagatggaggttattaaagcagtggttagaagtaacatagtgattaaaaaatacagtggcataacatagaataataattatcagttttcaaagaactgtagtaaaagaagtagtgagatgatatcaaaatatagtgactttaaagacatacaaagcaaggattcgaaatggcgcgattttgagcagaatgaacaatcttttgaaatcccagtagtttgaaaacataatagaaggggaatcagtaaagatcagtaaaaggatatagatgcacaacttcgagactgtttaaaatagagcaggagttttagtaaaagtaaaatgcacttcagtgaggtaaaacaggagtgggagtagcagggttaaaaatgtttaaagagaactgattaaactagtggggaacataattgatttgatttaatgcgtattaagcctaaagtttgcctaggcgttgtatacattgcctacttattttaagagggtgagcatgcatgtttagattctgatttaaatagatacttgtttgaaggaaattgtttcaagtagattaaacatattttatgggagtattagatcatgttaactaggcgttcaagttctgataaacaagaagtcctaagggcaggatatctaatgcataaattatcaccttaagacatggtttctatatgtcatgtttacaaaatgcatgagcaatacattatgatagccttttgttactcatttagttatactaggaacatggtgtcagatggcgtgaatataatagatatgttgaaatgaagcacctaagcatgattttaatgtatggtatgcatgtcctaagcatgatactattgcgcagatatggaaataaagcctaagtcatgatttctacccatactacactaaacatgcataattccctcccatattcactatccagccccaatcgtttgtttacaaattattacagaccatagtaaatgaattacagtaattgcaaagagaaaaataagaagttattctattgagagccttcaaacaggcccaaccttccagcctcacccctttcgagcttcacagccttacatagcctaggtgcgacaaagctcccaaaggtccttgtgagggccctggccaataccagcacccagcaattgccaaagttgagataggtgcagtgtagaattacgtgcctcagtgtgtcaaagttaagagggaactcaaggtccctaagcaatgctcacactgagggggtggaacctaaaggtctaagagtagtgtgaagtgcaggaaggagtagttaaaaagagttgagtttgaaagggagttttgaaataacctggcttagaggatactaaaaaaagtttgaaaaagaagcagtagaatggtcacaactcagaaggtatgcagaattcaagaaagcaaatacaaataggggaaagggattgaggacaagtaatagtagcagcatatttgcagtaattagtccttagcacaaagttacagattttcacagagtgtgatatgccaagagattatcatatattatagatacaaatctgagaatactaagtattataggtgcattagaagccaggcaattgatgaagaaacatacataaagagatgctagatatgcagaaagaagaagtaaaagatcacataggcgataatgaatcatagagaggaaaacaggagccatgttaggttagaagaagaagagagatcgtagaaagagagtagacatactagttacatggtaggcaatagaaccataagtaaaagcacaaaagaaacaacaagaatcttaaccaaaattgaaacatattgttttaggattagaatataccagtgttaagagagagaataaagcagaaaagagcaaaatgatagcactagtagccttggcttgcagccggctaataataggcaagaatagagagtaacaagtagagcaaagagaacagaaagagagtacaagagagtagtatagaatgtgtgtagtattaaaagagtgaagtatttatagttgaaaacaggtaatcaaataaggtaagaatcacaaatgcatggtaataagagaaggcagaatcccaatcagtcaggaaatcaatgacacggttcccttgaatcatgggattcaaactcagaaatggtaaagacatgcagccacataaggtaaagaaaatcagtaccatacctaaataaggaaaggacctaagcctgttaagtaatagggaaactcggaaacaattaactaaggaatcaagataatcattcccttaggtcaagggattcaaaattcaaacggcaaaatacataattacataaggaaaagtaaaaatcagtcaagaatcatagttcattaggtatagggtaaataattaaagctaaattcaaaacattctaattaaggacatagacaataagaatatagtacccatcagacaagtcaagtgaatcgattgattcgaataggagaggtaaaaattgaagcctcgaaggaaagtttatcaatcaaaccccaatgtatggagtccagaatcaatcaacgaagagtcacaattctatatataaatagacaagaatgaccaggcttattaaataggcagtcttagcaatattgaaagaaagaggcaagagttgaacgaacatatgaataaaatcacgcagagatgtcacaagtaggctaaagactcattcgaagcatgatacttacagaaaacctagcaggaatcaagcagcaagaagacccaaacacaaaagtccaaaaattagggcatttaacatatacaagatcaaaagtcacaaaatcatcaagatatgtagagaacagacttaagaacgaaaggaaactcagttaaaaactagcacataagagattttgggaaacccttgttttgaaaggaaacaaaacgttttaaaactgaagaaacttaaagattgaattgagaatagtgtaaaacataagaggataagcttaaatcgttaaaaatatagagatttaagaggtttaagcaaaaattagggtttcataagaaaccagagtaaaataggagaacctaccgcgaagctcgaaggtaatggtgattgtggcatgatcgtatcaaatcccaccggagaaggccggaaaatcaccaaagcaggagccccagtagtggtccaacatggtcgaaacccatggaggtctcaaagacggagacgatcggagagataaggcttcaaggcaggtggttgaaaggaggtgagcctggaagtggccgaagatgaaggctggagaccatcggagagccagaaggttctagagagaaatgggagaggaagagaccagaagagagagagagtcaatctcgatgaaaatgagagagacgaggggagggggggggggtaggtaaaggttaattaaggtaagggatgatctgggccgttgatctcatttgatcaacggctcagatttaattaggggtggccgggtatggattaggattgggctgggtatataattggggtttgggttggggttaacttggtttaaaacgtggctaaggtttaaataaaatgtggctaattgttaaatactcgtaaaaatagataattacttaattaattaattaaaatagctaataattgtataaaaataaaattaagttaaaataggtaaaattacaataattaattaatattaaaagtgtaatacacataaattcaaattttaaaaggtataaaatgtctaattaggccataattgcaaaatgattgtaattgtaattaattaagacccaatttggccatttataaaataattggattttaataagtaaaaagtgattatgaatgacatactgaactggaaaatattttgaaattatttagagcacaatttgtgaattatttaaatatgaaatactcattattacaaagagtaatttagaagacttatatgcaagtttacaattaatttaagaaaaaattgggtatccacacctagtgctctgataccaacttgtcacgacctgaaattcccacaatcgggaccgtgatggcgtctaacgttgtacccgctagaaaagccaacgtaattgctcaaatttattaaaaacctttattattaaataagaacaagtgaaatacgacttttccataaataaaagataacaatgagaacggataaaagaattacataactagatccacaaactttttatgaattctcaaaataaccaacccagatctttgcagtcacaatgtcacggactatctaagattaatacataaaaggtctgaaagaaataatacatctgttttgaaatactaagacagaaatgaagaagtagaaggggacgccaaggcctgcggacgcctacaggactacctcagtgtctccgtgtggactaaaggaagccgcatagctcaatgtccactaggttctgtactgggatctgcacaacaaaaattgtgcatgtgtagtatcagtacaactgaccccgtgtactgagtaagtgcgagcctaacctcggcaaagtagtgacgaggctaggacacgacaaataatatcacatgtgcaatatgataatatactaaagaaataatgacaggaagtgaacagttaagtacaaaaacggggggaaacatactggggaaaagggatagcaaataacaagtataacggaataaggaaacagtttaaatatcaaagtaacaacaagaaataacaacttagagaaaacaagtgtacggcatcacccttcgtgctttcactctcatcctcacaaaaacaagtgcacgacatcacccttcgtgcttttactctcatcctcaccaaaacaagtgcacgacatcacccttcgcgcttttactctcatcctcacaaaaacaataaaaaaatagaaatggcacgacattatccttcgtgctattaatatcatatcatggcacgtcatcacccttcgttcttttacactctcatcctcacaataaataaatacacggcatcactcttcgtgcttttacactcttcctcacccaaacaatatcacaacaggagtttggcagggaagaaatcaacagcatgaaccataacaataaatcataacatcccggcaagggaaaaacaacagaaataacaccgtcccggcaagggacacaactataaccaatatcactcaagtacataactttacgtaatattcctcagccaaaacaaaggttcaacagtactcacaaccaagaatttccatcaaatcaaccaccaccaaagtgaaatttaatccaagtacaataaatatcaatggaaatcacaaaattcataatattcgactcacgggcatgcttgataacaacatataggtactcgtcacctcacctatacgttgaacatggaataaacacatagaaaataggactcaacacctattccctcaagctaaggttaggacaaacacttacctcgacctccgcgatcaaaatcaagcctcaagcaccgctttttctttcgaactcgactccaaatacattgtatctagacataattgactcaataacctcaataaatgctaaacaattcaattccaatgcttaattatagactttctagccgcatggtcaaaacacgaggttcggaccaaaacccgatcaccattcacccacgagccagaatatataatttgttttgaaatccgaccccaaaacgaggtcaaattcccaataaatcaaaaggccctaactctacccaaatccctaattttctacccttaatatcatgttttaggcctagaaatctaataggtgttgataaaaatggaatgaaatgagtcaaagatcacttacctatgaagttatggtgaagaatttcttccaagaatcgcgcaaagtggtgtgaagaaggagttgtgaaaattgggtttaatcccgtaagtgtattctattttttttttactgaaaatataactaggcaaaaagttgacttattagacctatgcgttcgcgagcgtgggaccgcgttcgcacaaggttaaagatacccagccccaaggtcccctctaaagttatgcgttcgcaaccacctaggtgcgttcacatagtttccccttttctatcttccgcgatcgcaactaagggaccgcgttcgcactaagtaactagctacccagccccagcctgtcaccaaacctatgtggtcacgacagaaggggtacgttcgcgtagataaaggaccttaaagctccgcgttcgcacccagctctttgcgttcgcgtagagccaaccttgcccccatcccagcatgtgctatgcgatcgcggaggaccttatgcgatcgcatagtacattacaccagacaccagcaaccagttttgctccagatttgtaagttcaaaaacaccccgacgcctatccaaaacacacctgagccctcggggctccaaacctcaaaacatcctacggacttatttgtgtaatcaaatcaccaaaataacagcataaacaacgaattaaaccccaaatcaatgaaaatttccaaaaacttctaaaacatcaaactttgcatttatggtccgaatcacgtcaaatgacttccgtttcttaccaaacttcacagatatgacataaatattatatcgaacctgtatcgggctctggaaccaagataaaggcccgataacatagatttcacatacaaattcattttaaaaaacctcttatattttcagaaaataatttcttttaaaaatttatttctcgaacttgggccctcggaatacaattccaagcatacgcccaagtcccatattttcctacggaccctccaggaccgtcaaatcatgggtctgggtccgtttaccaaaaatggctttttcctcaaagtcaactcaatacaattttcaacacaaaattatctttttcctcagtttgtcgcataatggcttcccggcgacacgctcgggcgcatgcaaatcgaggtgagatagaaggaggttctcatgacctcgtaacacagaattagctagaaatacacgggatgaccttttgggtcatcacatgagcttttgaaagctctcctcacactcctcagtccacttgaatggagcacccttttgggttaatgttgtcatatgtactgcaatggatgaaaatccctccacaaaatggcgatagtaccctgccaaaccgaggaaactgcggatcttagtaggtcatgaaatgtctaagccaactctgcaccgcctccaccttcttcgggtctaccttgatcccatcacaagacaccacatggcctaagaatgccacataattaagccaaaattcacacttagaaaattttgcatacaatttcttctccctcaaggtctggagcacagccctcaaatgctgctcatggtcctcctgggaccgagaatatgccaagatgtcatcaataaacacaatgatgaaagaatcaagataaggttggaacacactatgcatcaagtgcataaaggttgctggggcattggtcagccgaaatgacataacaagaaactcatagtggccatatctggtcctgaaggcagtcttcgggatatccgactctcgaatcttcaactgatgatagcccgaacgcaggtcaatattggagaataccctagcaccctatagctggtcgaatagattatcaatgcgaggtaatgggtacctgttcttcattgtaaccttattcaactgccggtaatcaatactcatacgcatcgaaccatcctttttctttacaaacaataccagagcaccccaaggtgatacactgggtctgttgaaacccttatcaaacaactcttgcatttgctccctcaactcagaaggagccctacgatagggaggaatgggaatgggccgagtgcccagcaataaatcaatgcttaaatcaatatctctgtcggacggcatacccagaagatcagctgggaacacatcagggaagtccctcactactgggactgactcaactgtaggggtctcagcataagcatctctcacataaaccaaatacacatcacaccacttctcaaccatctgttgtgccttaagaaaagaaatgacccatgcggagagtatactataaggtacctctccactccaatctcggcaagcctggcatagccaacgtcacggtcttggcatgacaatcaagaatagcataatggggcgacaaccagtccatgcccaagataacatcgaaatctaccatactaagtaataataaatcagccctagtctcaaagccacttatgacaatcaaacacgactgatatacgcggtccacaacaagagactctcccacgggagtagaaacataagtaacggaactcaaaaaatcccgagatatccccaaatgtgtagcaaaataagaagacacatatgaatacgtagagactggatcaaataatattgatgaatccctatgaaaaacaaggacaatacatgtgatgattgaatctgaagcaacgggctctgaacgggctggaagagcatagtacctggcctggcctccccctctagggcgacctcgacctccccgaccacaaccacgagctgcctgaggaggtggggcagtagctggggctggaagaatatatggaggaccctgtggagcacgtggggcatgataagactgagatgatgcacccctcctagctttggggcaatatttgagcatgtagcgaggctcaccacaccaaaaacaacccctcggaggacgtggctgttgatgttaactctgaactagcctgctagactggccggtgatagcacctcgagcattaggcacactagatactggtggtgcataataaggctcctgaggtctaggaggagctggaatatcgctagctgctggaagagctaaatgaacagggcgactcacaaaacccctaccatagcgtgttgctggtgcacgaactcccaaaaaatgaccagtctctcaaaacctctcggcctctctctccttcctgtcctgggctaacatactctcaatcctccgggcaatactcacatcctgttgttaagtgatactggtctgaatactggggtggagtcccgcaatgaagcgtcgaaccctctctctgattgtggcaaccaaagccggtgcatgacgtgccaagtcattaaaacatactacctactctgacaccgtcatagtaccctggcgtaactgctcaaactccgcacgccaagcatccatgaggctctgagggacaaactcaagtaaaaatatctctgagaacggagcccaagtgagtgaggatgcctcatccagattactcagctcaaaggcacaccaccactgataagccgcccccctcatctggaaagtgatgaaagaaaccccactcgtctccacaatacccatagtgttgagaatgcgatgacactcctcaagaaaaccaagagcgtaatatgaagctagtccgctgaaatcaggtgagtggtgcttcttgtacctctcaagtctgagctgctctacctaagaagcaactacgcaactaccctagcaacatgctgagctagagccgctgggggcataggaatatactccggaacctgcctaacatggaccctctgctcaggagtacgggttgcgggagtgtgtgcccctccctcggcctgagatgtggctagagctatcgacagtagtcccgcctgagttagagtgatggaagtgctcatgaactgagccaaagtatcctggagggctggagtaacagtaggaacctcctgtgcccctccaattgtagttgttgagggctcctccgtatctgctctcgctggtgctcgggctgcaccacgtgctcgtcctctacccctgcccctgcctctggcggctttggttgggggctcgggtgcctaatcatcagtacgtccggtacgggtcctcaccatctgtggggaagagtagaatagagttttggaattttgatgacagtaactagcacgacaagaaattccaaagaatgtgattgttcttaacattttcatagtctctcaaagatagatacgtacgtctctgcaccgatccgcgagactaataaaccgggttgtgacttgtgactcctatgaacctagatgctctgataccaacttgtcacgacccgatttaccctccaattggtatcgtgacggcacctagtctctacgactaggtaagcctaaatttgcggaaaaatatagataattaaataaagactgaaagaaaaacacaagtagacataacattgccgctcggcatgtacaaatataacttcccaacacccagaaaatcacatttagtcaaaaactctataccaagatagctctatacaacggaaaggaaaaacataagatgtttctatctaaaacaagaatggaaggtgactcgaagggcatctacggacgcggcagaattaccttgcggtctcctcaaagctgctacaaggactcctagccatggaactgagtactggtacctggatttgcacccaaaaatatgtgtaggaaagggcatgagtacaccaaaattggccagtaagtgccaagccctaaccccagtcaagtagtgacgaggtcagtttaggctctactggagtttataagtaaaacaatttaaaacaatacagaaggatagaatttctaaggtaagtagtaaaaatgaataaccctaaaataaaacagcaacagggagcacttggctcaccataacgtagcacacagcggaatctcccgagatacgtctcgtagttccaaatgtaaagatgcagtacagggggaaagctcccggaatacatctatagtcccaatgtaaatatgcagtacagggggaaaactcatggaatatgtccgtagtcctaatttaaatatgcagtacaaggggaaagctcccggaatacgtctgtagtcccaatttaaatatgcaatgcaaatggatgccggataagggtatttcaacagttcaggaaaaagtcacggacaagaacaagataaagactaactaacatggtgcacattgtatgaaatagggaatttaggtgaaacatgtaggcgtcttcctaatctaaaatacacaagtagcacattaaacagtgaaataagagtaaaatgatttatggcatggataggaaaaatggaattttagcaacaatggcccgtgtacgtactcgtcacctcacgtacacggcgcccatacaacaaatagtatcaaaacaacctaaggggaagtccccaacacagagttaggcaagccacttacctcaactgctctactcaactcaacaccacgctcttaccacgagtacctgactccaaatggcccatacaagaattaaccacgggcccacgtctcgaagttgggtaaaaattacaaattccgaccgcccatacactcacgagtctaaccatacaagaattaatcgaatcgaataccaaaatctcgatcaaaactcaaaatcttggcctaagaactttatccaaattttccccaattttccaccataagtttgaaattaaaggataaatttaagtgtataatcatggaatttagtctaaaccgagtagaaatcacttacccaaattgcgcaggtgaaaatttcattaaaatcacactttcccgagctcccaagttcaaaatatgaataatggttcaaacccttgatttggatcttttatgaatctgccaaggtcacgttcactgcgatcgtggaccaccagtcgcgatcgggaagggtaacaaacacgcgcctaacttttcctctacgcgaacgcagggataagctcgcgaacgcgttcctcaacatactcatacctacgcgatcgcagttggcttcacgcgaccgcgtagaagtatgctaaaacacctgccaccttatttcttctacgcgaacgcaacaaggcccacgcgaacgcagtggccaaggctgcccaacctatacgatcgtgttcctctttatgcgattgcgatgaacaaaatcctgcctgcctccatttactctacgcgatcgcggactctctcacgcgttcgcgatgaaggaaaaactgcaacaattccaccagccaaaaccagcaatcacataaggctaaacatgcccgtatgagcatccgaaacacaaccgaggcccccgggacctcgaccaaacttaccaaccagtcctaatacctcattcaaacttggtcgagccttcaaaacacatcacataacaccaaaatcaagaattatacatggattcaagcctaagaacttatgaaatttcccaaaatccacaaccgataccgaaacacgtcaaaactagtctgaatgacctcaaacttttacacacaggtcataaatgacatacggacctacatccactctcaaaattccatgctgggcccgatatcaaaatttcacctatcgaccaaaatcgccgaaattctaactttcgccaactcaatcctaaatctactacagacctcgaaaacacattccggacatgctcctaatcccgaaatcacccaacggagttaacgaagtcgacaaaattccattccggatccgtattcacacagttccacctacggtccgatttctaaagcttaaactcacatatagggactatgtgtccaaaaactccccgaaattcacaactaaacattccgaaaagtcccaaaagcagaaatagacatggggaaacagttattagggaattggagtgctgactctcaaaacgaccgaccgggtcgttacaagtagccacacacaagagtgcaagaaaaatctcataattttttattgatattgtctataataatctaagtctaaaaacaaagaagaaactctttatatagagaggggtcacgaaattgtacctaaaaaacaaggaaataaagtcataaactactttggacaacaagtccaactaccttaggaaaagacaaatactaggaagcaaaaaccaagtcattctaggaaagtaattcgaaaatttttagtaaaaggaaaacataaccttaactaactaggaaagcaattaaatatagtcccataatatatggaaataagtcccaaaccaatcttggatagaatcttgaaaatcatggaaatcttgaaggaaattggcaagcaacttggtacaaacttgcacctaacatctagcacggctattgtatccttcttgaacatcgtgtaagtcctttttatactatgaaaacgtggctttatgtaggacttcatgggctgcaagtttggacacattttaggtgccaaattggttcaatagttgactgactacgaccttcttcaaagcatatctcttaggatccaatcctcctcttgtttgacataaacttgggccataaaaaagttgtaatatctagccaattgatatccattatccttgagctctttcatcccagttaacaacttctttacttgcacttgatatctaatgaccttgtttggcaaaactttagcttgacatcttgttaaaggccatctttgagattccaaagattcattcttgtccttgaatatatttgagcttcctaggatgctatcacttaaaatatactttgcttacattgtttcgtttagggaagtgtcttcctgaatgacctttaagggttattcgtccattcttttagcgccggaacgcaatctgaaattctcatgaagtcgactattatcaaatcactcagtccctaattcatatttgtttaccttgttcactagcccatactgatttctattaccttggggtctaacttttcctgctagtaatcacgttagatccacgaacttatttctcgaaatgaggatatgaatttatggcctatactcttttgttgtctcaaggcctgtcacttctcgtcatttccttcacttgactataggctctgtaacgctatcatttttgttttgatctaccgttgtcatccatgtatcacatattactcataatgcttcattaactctcttcttatttccctgctaacatctttgtctatcactttgttctgaaaacttcaacaagacattcttttgcttttagctccccttgctccatccactggctctttgggttgcctaacattctctctctaccagggacgggagccacactaagataatatttatcccttccaggcttccagtgcctatctttgtagtacttatatctagctgacgcaaaaaatccatccatctgggtgtctcacaaggagatctattagcacatttgcaatgtctttcagaatgtcaactaacgtaaacaatccatccatccttttgggttactctaacccccgccgaatccatatatctcgtccttctcttacaccatatccgttagtttccataaagcataactgagatgagtgaggccgattgtacatacctttactactgttgaaggtaactcaaaatttatatctcccttcctgaatggtaaataatgataatcttcactacttgggtaccttggtgccatgacccaaaactatgggccgcaacgggcacccgatatcttactcaaccgagtaccaacgtaacatatctttcttattgtactgtcattggtaacttggccaacatggccacaactggtaatgtataactataagtgggaaagcactgtatccatgaaccatctttcataaaacattaatacatatgggtcgtcaaggcttttaacatacaatacaagatgaacctctgtatacaaagactttaagagtatttgacatcaaatgggacagggtaccagcctactcgtaagtctgccgcaacattctaacacaataacgcatagactcgaatgcattcccaatgaggtggagtcttaccgatccttcgctgaatgctaacctcctctactatgagggctcatcaaactaattttctatacctaaaggcataaatccagtgtgcccaacaaaggacgtcagtgcgaataatttaccgagtatgtaaggcacataaataagtatataaaccacatggaagaaacatggagtacatgactcaacttgtaagtctggataactctgtaaatcaagaaatacttatagtgtcatgcatatgcgtatgaatgtcatgtcgttcatagttacatgtgttcataacatcatcaagcctctaagggcatcccatcatatcatctcccggccactcggggcaaaatcatcaacgtataccagttgatcaggtggtggtgcgtatataaagccgttaccttttcctatatcccatatatatatatatatatatatatatatatatatatatatatatatgtatgtatgtatgtatgtatgtataagcgtatataatgtcatctggtcatggatcaatgtatatgtataaatgaatgcaatgcatgagaagtacgtcaataaaatctctcggagtgtcataagaccattatggtatcatgaagtcaactttatcaacttacgtattttctgaataataggacacgtgaggaatcaagaacataagcatctttagcatttctatgatagagtcatttatggaagttgtgcatttgctcgtttcgtttgtgtcgtatggatcatgccaaaagaaaataagggatagcctttaacatacctggaccgattctcttgacaattcctctaacacacgtctttttcgacaaaacatatgacggcaagatcggagtagggaaaatacgtataatattcttgaaaaagattgcaccgtactcccttaaaattgcaaaacctcacgttgatttgaattggtgaaggcctttcgttgcttatatgatatatgaagatgcatatatgaattactcatgttacctaccatctcacttacaaagtcttacttacaaaatcttacttacccatcttacttacaaaatcttaatgtttgagaatttccattcgttcctacatgtttatctcaatttgtgattttgaaaggccttttatattagagggtgtgggccccacactttgtatgactaagagggtgtttggctaagattataagttggttaaactagcttataagcactttttgacttatctacgcgtttggtgaagttaaaagtgcttataagccaagtgcttataagtcaaaaataagccaaaagccataagttggtcacccccggcttatgaatttttagattatacgcactttaagtttgaccaagatttttattattttatccttaaaatattcctttttagaacaaaactcactacctcaagtagagttgcttatttggttagtatgattagtacatgtatttgttacaccccatgtttttgtacgtgaaagtacgccataagttaattagttaagatcaaataaacaacaagggaagctaaaagcaagaaaaatctaatttaagccgaaaaagatgaaactagcaaccagaaactcggtcataacaagtacaacttaatacacaggaaatataaggacctaagaatcctaaaaggccaatctatttgcaaataagtccgagtacgcactcgtcacctcgcgtacatgggctacaatcaacatatttctaaggggtaattcccccacacaagtttatgcaagatacttacctcaaagacgacaacccagtactctaaattgaacttctcgggcgaaaagacctttggacttctcaaaatcaactaaaacaacttcaaaatacatataaaacttgtaaggaactattgtattggtaaaaaagagtctcacatgtaagcaagatcttgacaactcagctagctacgtggaccaaagaaaacatcacagatggacatgattttataaagaggtacgagattaactcaacaagcacgagcgcgagattgactcgacaggcacgggattgaatcatcagccacgagtgcatcagccacgggaaacccaatgaagaagaagagatgcggtcgtaaagaacccaaacaaagccacggatagattcgagaatcaaccgttaatgacttatacgttatgtaactcctatataatagtaacggttatcctttgatgatcctttgtaacgcctcattaatgtaataattagccattaatgagcaatcatcatagaaaccaaaacgttatgctaggaagcccctatataaaagggaagaattgtaatccataggatcatttgaattctcgaatacaaacttctttacttttatgcattctatattgcttattatttctttattcattatagtattcacttgattatcagtaacccgtgtttatcctaaaatagctttggtcaaggaatctcattctttggttaaacaaattggttccgttaccaggaatctgataatcatagtgtgtttaccaactaatatcctttacattatgtcgaattccaacaacaacatcaacaacaacgacaacaacaatgtcaacaacaaacaaggaaatggaaccccggttccatctcctcgaggaacaccacatgctttgagggaatcatcccttgaaagatctgataaccatcgtaacaataatgagcaagcaatagagcaagatcaaataaggcaaatgattgttgaatacgtggggcaggctttgcaagaatttgccagaggattaccacaggcacctccagtaccactaacgccgccttcaaataatacaatcgtagtagagaattcgcagtctggattaataaactcaaccagaggtgaaaaccccaatgcatctcttgaaacgagaccaggtacgactaataactctaagttacaaaatttattactaaccatgtaggaacagatgaaggaacagaacgatcgcatcgagaaaatccctggagtaccgcctatcatcaagggccttgatgttgatagatattctcaacaaccttgaaagccaagtgcggctccattgcctatacccaagaaatttagaatgcccgacgttcctaaatatgatggaacaactaacccacgcaatcatgtgactgccactattggagtaaaaggcaatgacttaacaaaagaggagatcgaatatgtccttgtcaagaaatttggggaaacgctcacaaaaggagctttaacctggtattctcttctccctgaaaattctatagattcctttgctgaacttgcagatttgtttataaaagcacactctggtgcacaaaacgttgaaaaacgaatggaagatatattcaagacaaagcaaggagacatagaatttcttcgtgaatttgtagacatgtttcaacgagaaataatgcaattaccaagggtgcctgacaattgggcagccatggcatttgcaagcaacttacaggataaaagctcaaaagccacgagatgacttaaagaaagtcctagagaattcccagctacaacatggaatgatgtgtataataggtacagtaccaaacttagaatcgaagaagatatcattgctcgatcaaaagatgaagagtatcccagaaccagacgtcaagaaccagagaaaaggtaaggtaaaaataggtacgatcgttacttaagaccttcgagacgtgacacacgtcccaggttcaaaaatacaagatcatcgggaagagatataggctcatcctcatctagatctagaagagatcgagatgaacggtccaggggtaatacctgaattggagaccataacttcaatatgagcagtacttaacttgtctaaatattgagaaatatgggagacacgtttaaatggcccaaagaaatgcgatctaatccaaacaagaaaccttgatcagtggtgtgaattccacaaaggtgaaatagaacatctattaaaacagggctacttaaatgaattgtttagtgataaaggtaaacaggaatatatgaagaacaggcaggagcccccaaaacctccttccccaaaacgaactgtcaacgtcatacatggaggggaagaagtgaacggcatggtctactagttagcatcaaaagtaacaagtacccacgggaaacgagttcgagaaaagacgaaggaagatcaaataacctttgatgacacagattttggcggattaaggcttcctcataacgatgcactggtaatatctttaattattcatgacactaattgatccaggaagttcagtcaacattattttgataaaattcgtggtggaaacgctggtagaaaatgaaatgatcccaaaggcacgagccatatctgggttctataattcaacattgataactaaaggagaaatcaaacttaccacttacgccgaaggagtcatcaaaaatgcaaaatttcaagtcattgatacagagatggcttataacgttatattgggaagaccatggatccatgatatgaaagtggtcccatccaccttacatcaggtaataaaattcccttcaaagtggggagtaagacagattagaggtgaccaacaaacttcgagaaatatcaattcgatagctcttcacaacagaaaagatacgggagagacaggaaattatcgaacagaagttcctcaataaacaggtatggaaaaaacctctgatcaactatgtacaaaagaaatggatattcaaatatgtacggaaggagataacgatgaaacaaatcactttaccattaaggatgagctagaacatgcagacatagactccaggacggatttcattcgtgaaccagaagaagacgagcatattaaaacaactgttgaagaacttgaggctgctccgctttctgaacaaaagcctgagagaaagttgtatattggcacaaaattgctggaaagactaactcttaagcaaaaaggtatgttagtcaagctaatgaggactgttttgcatggtcccactcagatatgacaggtatcccactagaagtgatgactcataaactaaataaagatccatcctttgcacctgttaaacaaaataaaagaaagcaaggacctttcaaaaatcaagtgattgacgaggaagttcaaaaactattgaacataggctcaatacgagaggtaaagtatcctgactggctggctaacaaagtagtggtgcctaaaaagaacggcaaatggagggtatgtgtagattatactaatttaaataaagcatgtcctaaagattcatttcctttgccacatatagatcaaatgatcgatgctaccgcatgtcatgaattgttaagttttttggatgcatattctggttattaccagattaaaatggattccctagatgaagaaaaaacttcattcatcactaacagggggacttattgttataaggtcgtgccttttgtcttgaaaatgcaagggccacttaccaaaggttagtaacaaaaatgttccaagaacatttagtaaaaacgatggaagtctatatcgatgatatgcttgtaaaatcaacacaagcggaaaaccatctccagcatctctccactacttttcacatcctacgcaggtataatatgaagctcaatccggaaaaatgtgccttcggagtacaatctggtaagtttctgggattccttgtatctaatagaggaatagaagtaaatccggctcaaataaaagctatagaagaaatacctgaaattttgaagaataacaaaagatgttcaaagattaacaggaagaatagcaactttagggagatttatttcaagatctttctagaaaagatttaaattcttttcagctcttaaaaagcaaaatcagtttgagtggactgaagaattccagcaggcactcaaagacttgaagatttatgtaacgacccgaccggtcattttgagatccagcgcatcgttcagcagttgggagtcatgaacaacttcatttcgggtattatgacttgtgtgtattgtcagagttgaaattcaggaggttcggagttaaattgaaaggaaaattctcatttcagaagccttaagttgaagaaattgagtaagactagaattttgagtaaacgacctcagaattaggatccgaagattccagcaggttcgtatggtgatttcggacttgggcgtatgtccggatcgggatttggataacccgagagcgtttcagtgtatattgtggaagtcagcattttgaagaaatttcctaagtttggcttgaagtgcatttcaatgatattgatgttcgtttgggattctgagtctgggaatagctccatatggtgattctggagttgggagcgcgatcggaagtgaattcggatgtccgggggtcattttgaagtcatttggctaaagatagaaatttgaaggtttttgagaagtttgaccgagagtttgactttttgatatcgggttcggattccaattctgaaagttggaacaggtccataaagtcgaatatgactttgtgtgcaaaatttgaggtcaatcggacgtgatttgataggtttcggcatcagatgtaaaagttggaattttcaaagttcataaagttgaattttagtgcgattcgtgaatttggcgttgtttgatgtgatttgaagcctcgagcaagttcgtggggtgttatgggactgagtcgtttgatttggacggggtcccaggggcctcgggtgtgtttcgggccattttgctctactttgttgttgctgtcatctgatgtttctggtgtgttgtgcgatcgcatcccttgtagtgcgattatgaaggagaaaatgggaggggtgattttttggtctgtgcgatcgcggcctcagtggtgcgatcgcggagaaggatttggagggagctaaaaaaaggcctgtgcgatagtaggcatgcttgtgcgatcgtaggcatgcttgtgcgattgcatagaagaaatgttctgctgtactgactcgacttcggaggctcatatcttacaatctataacaaattttgagatgatggaaaaatgaaagttgtactcctttgttctaatttctagaaatgtaagtcgtttagcatttgggtttgtttataaaacgatatggctgttacactacagggtgtccgggaagatgaagaccaaatttgtgttgcacagagctgactttggcagcttatatcatgaaatctataaggagttgggagatgaccaacacatgaaagttatagatccttaagcctagttttcagaacatcaaaccatttgtcatttggagttttgtgaaaaccgttatgactattctactcgaggctgtccgggaggctgggcatttgttctctgcgatcgtgaagctctttccgcgatcgcgaagctttttatgggatcgcactgagtaaatacctgggaagaatgtttaaaaaatgggattttggccatttcatcaattccttcacttggttggggcgattttggaggattccaaagggtgattttcatcaagcatcaagaggtaagatattctacttatttccaagttaaatacaagattattacaccgatttaacatgaaaatttgttgtaaaattgagaattttgaagaaaacctaaaattttggaaatttggattttagccacgaattgagcatgaataattgagtaaaatgtgtaattgtattagtaaagcttcgggtagggattttcttcaagaaatttcgaggttggggcacgtgggcccgaggggattttggtcatttcattaagccgggctgaggaactttgtaatttgaattggttatgatctattgagtatatattcattgaattgtcgttatttggatagtttgggagcgttgcgcatccattttagtcgtcgtagaggcttggaagccgatgatgaatcttcggagcgaggtgagtctcctttctaaccttttaagagagaattgtccccttaggcgttctatatactacatttaattgtttgctggggctacatacgtagcggctactattgttatgttcgggtagttaggccccacatcatgccctgtatacttcttgtaatgaattatatgtatgttataatatcctgttgtgtggttttgtttctctgagatttatcggttttaaattaatatggaaggaaattgttttcacggaaaaatattatgaaatgtattaacttatgggaaggaatatgaaagaaattatttatggaaagtactatgaaaggagaaataatgacttataagttttgtactcatgtaagatattattgtttccccaagctttcatttacttaaataattggaaaggattgtggtgaaatgaactttacattatgtgtgcgcatgttgtcacttcgtaatttacatcccgcgagcgatatgtaatttccttcactcttatgggagcgggccgtacgccacgacagatttatagtgcactcttggtatgggccggtcgattcccgacagtgcacaggaatttaattaagaatgccctcttggtacgggccggtcgatccccggcattgcgtaggcatgattactgttaagcatgcactcttggtacgggccggtcgatccccggcagtgcatagctattctccctcatgactccagccggttctcctactcctgtgtgcgcatgactgtttggtacttttgttttcctgatttatgatttgacagatgtttggggaaatgagacatgtgagttgttactgctttcaatatttacttgggaactctgtattctcttcacaattgtggtgcactatttacatgtttactgctttccttatatcctgtttatttctatttactgttggaccttagtgagtaccaagttgacctctcgtcactacttcttcgagattagacgggatactcactgggtacatatatgtatactcatactgcactttctgtgtacctttatcagtgattgatttggaagacttatacgggctgcattcatccagaggcgttccacagctgccggagtctcctttttgtgtacttacattttatatttattgcctttgtccaatttgtttttcggacaagcgttgtataattgtataaattcttagaaattgctcatggacttgtgtcaccgggttctggggatgtcttggtttttttttttttttttttttttttttttttttttttttgtattaagttggtttcttgccgtatttaaattacgaaatttatttagttaataatgaaaatgcaagaagaggcttcgattcgaaaatgttaagcaggaagttgtttggactagttcaggggccggtttgcctgacagtggtgtccgacgccatcacaacccataggttttgggtcgtgacaatttacataaccaccgctgctatcaaagccaagagaaggagaaagattatacatctacctggctgtttcaaaaattgccgtaagtgcaatactggtaagggaagaaaaaggtaagcaatcccctatttattttgtaagcaagactctattagatgccgagactagatatccacatctagaaaaattagatttagctttaataatgacatcaagaaaattgcgtccttatttgcaatgtcatctaatcactgtcgtgacttcatatccttagggaaatattctgcacaaacaagaactgtcaggaagattagccaaatgggcaatagagttaagtgagcatgatataacatatcaacctagaacggcaattaaatcgcaaatattagcagactttgtagctgactttagcaacaatattacccctgaagtggaaaaagagttacaaatcttcaatggtgtaaacccaggtcaatggaccctatttacagatcgctcttctaatgtaaaatgagctggattaggcattatactgacatcacccacgggtgaaaagatacgacaagctattaagtgttatccaatcactaacaatgaagcagagtacgaggttgttattgcaggtttagaattggcacgggagctgtcaattcatcaaatcgagatcaatagtcattctcaattggtggtaaaccaaatgcaggggacttacatcgctcgagaaactcgaatgcaacaatatttagaaaaggcacgagaacttgtaagacagttcaaaacgtggaaaataatacaaatacccagggaggaaaatgctgaagcagacgcgttagcaaaccttgcggcagtcacaaaagtaaccaataaagacaacaccattgtcgtccacctctttcattcagtgactgaccaagaaagaaatgaggtatcttttaataatttaacttgggattggagaaacgaaattctcaatttcttgcagagtggtaccgtgcctgaagacaagcagctcaagcgcttcgccgcaaagcagcaagatattgtcttgtacataacacgttgtatcgtaaaatgttcgggggatctctagctaaatgcctcggacctaatcggacggagttcttgataaaagaagtccacaaaggacattgtggaaatcacgcaggagcaaggcactattggcctaagatggaagaagacgcggataatttcatctcaaaatgcgataggtgtcaacggtttgccaataatatgcacagaccagcggagctattacattctatcatatcaccatggccctttatgaaatggggaaaggatatagtgggactttttcccctagctaaaggacaggtacgattccttctggtgcttagtgattatttcacaaaatgggtggaagcggaagcattaaaacaagtacgggaaaaggaggtcaaaagtttcttatggcgaaacataatatgtcgatttggaattccaaaggagatcgtgtgtgataatggtccacagtttataggctctcaaatcatggagttctttgaaagttggaaaattaaacggattacttcaacaccatatcatcccgtagctaacggacaagctgagtctacgaacaaaatcattatcaacaatataaagaagcgcttagataaagacaaaggcagttggaccaacgaattaccagcggtattatgggcatacagaactacgtcaaaaacggctatgggagaaacccctttcgcacttgtttttggctcaaaagcattaatacccatggaaatcggcgaaccaagtttgagggtgaccacgactatggagcaaacaaataacaccgaactccaaaccaatttggacttgctcgagtcacgaagagaagcagctctaatatggatggcagctcaaaagaaaatcatagagcgatattacaatcgtaaagctcatctcagatattttaagatcggggacttcgtacttaaaaaggttttccaatcaacaaaagaagccggatctggcaaattgaatccaaattgggaaggaccctataaggttcggggcatagccgggaaaggtacgtacgagttggaagccatggacggcaggattctaccaacgagctggaatgccattcacctgaagaaatactacttctaaggaaaagaagtaccccggtcaggtatcgcacgttcgattttatctttgaataatttaaattttactaacttttttagatgataggaaaaaagctaacccatcaccagatgatgacatcatacctgcaaagacacgacgaaataacacaattcccggtctagggttacactttcttatggatattttaaagggttaagcagttatcatctaaaaaagtataactttgagtccggaatattttcctttttctggaaaaggaccacaaagaaggaacaatcaagtgctcgagatctcattcttcaagcctactctaaaaacccttcgaaccatgttcaggttaaaaggcaaagtatcagctatgacgaagaaatgtacatcttacacttatacaaaatctgttgcaacaaaaatcagttagggatataagatcatcatcattatacttagtcaaaaaactgtttaattaaaaaacagtcacgaaatctttgtactcaagtagaaaattgttattcaaataaaatagttacggatgaaagatcataacccttgtatttattctcaaaactgttatcaaataaaacagttacgaatcacgatacgtttctctcgtacttgttataaaacggttgcaaataaaaacagtcatgagttctaagccaataaggtgcgttacaaaaaacagtaaaacaatcaaacatgttaaaatgttattcgaagaaaattgtatgtatgaataattcaaaggcataccttcaaagaattgtgcaccacttcgttggcccaagtaagagttgaatggttgtcaagtttggacctctcttcagagccgatcagaggtttgagccacactttaggctcacccgtcttcttaaaaagactccctccgtctggaacctcaattataaccctccgcatctccctgttggaagaccctacttccacaagagaaggcacggaagcaggaacggaaggagcagcaacagatacggatggatgaggagctgaggaaataacatatacggacagaggagcggtggtaataacaagaggagcaggaacaacaacaaaatcaggaaagatagtaaagggaacatcatcaaggtctagctcaaacccttcacggaaaagacgctcggcaggatcttgaaccggggactgagattcatctcgggaagaagaaggcctaattgccaacacggaaggaagaaacttgggagcagattcatcatttgaaactactcgtcttcttctcgaccggtgcaccaaagcaccctcttttccttcttcctcttcccctccagaatggggatcgctgacttttctcttcgaagaactggtaaggttgctctgagcatgggacaaagacatcttcgggagcgatgaaccagatgccccacgggcagaaaaccgtatcaagaaaaaagggaaacattaaatgagaataaaaagaactcaggtaaggcaggaagtaagaaaaacttcgcttaccatgggtcttaacaatccaattgtacttcatggaaaagtacttccaagatctttattcaacaggagcggcagacaacattctttctacccaatcacgaatatcggagacattctgacggtattaatgactgctgaaaaagaaaagaaaaacacatgcggtattaaaaacgcaattcaaatctaaatgaagaaaatagatacgaaccaaaaagtacttacgtgcacggttccacttctcagggaagagaagattgttttcaccaaccagtgcgaacggcaacgtacctgaggtaccaacctctgtccttatcgtcacctggggttactaaaactcttttactccgagcagccagagtaaaaaccccttgacgaaataatacaggagaatataaatgaataagatggtggaaggtgaagggaactgaaaccttagaagctaaaactctaaagcaagcaactactcaccacactaaaggaccgacttgtcctagacagatactgaagaagcggcaaaactcgatgataacaaggtcaatgggaggtttaaatccttgtgtaaaaggataagtgtaaacgaaggaataactcgtcttataagacataatcctatgattattattcggcacaagaataagaacattagactcccaagaacactccctgcggacaagaggaatgtgaccttcagtaataattgtcgcatacttctctacactctccaaagaagaagactgttcaacgatagattaattttcccttgtaaagactatctcagcaggaataattggttgacgaatatcatccttactcttagaaacagagtgagaagacctagctctaggagacaacaaagacctagcggaaggaggagaaaccagaggagaaaaagaacctctagtagaggcagatcccagactcctcagtcggccgcctctccagctcctagatggagcagaagaagatgccagagtctctacatctataaccttttctggttagtttgatgaagacatctttacgaaaacaaaggaaaattctttgcaaaagagtaattaagtatggaagtgttccgtgaaagtaaagaaaagaagaagactatttatacataagggcaatcgtcaaaacatggaagaataatgatggaaagtcacaatcaaatatgtcacttcgggactaatatacctgcaaaacgccttaaaaagtgccgattcattacagagccaatcagaaaaggacacgtggaaggagcattaaatggaaagtgataaacgacgactatgttcataaaaagatacaatgttacgaagcaaagcggcgacaaaatattcccgccataaatacatatccacttaccaaatattaatcgataaatatatggtaagtggggggactatctgtattggtaaaaaagagtctcacacgtaagcaagaccttgacaaatcagctagctacgtggaccaaagaaaacatcacatatggacatgattttataaagaggtacgagattaactcaacaagcacgagcgcgagattgactcgacaggcacgagattgattcatcagccacgagtgcattagccacgggaaacccaatgaagaagaagagatgcggtcgtaaagaacccaaacaaagccacagatagattagagaatcaacagttaatgacttataagttatgtaactcctatataatagtaacggttatcctttgatgatcctttgtaatgcctcattaatgtaataattagtcattactgagcaatcattataaaaaccaaaacgtcatgctaggaagcccttatataaaagggaagaattgtaatccataggatcatctgaattctcgaatacaaactgctttacttttctgcattctatactgcttattatttctttattcattatattattcacttgattatcagtaacccgcgtttatcctaaaatcgctttggtcaaggaatctcattctttggtcaaacaactattatgtataataaagtttcaatctttacaaaatataaaaatcgaccctcgggcccgcacctcgggattcgtcaaattttacaaaatccgaatacccattccaatacgagttcaaccatacaaaatttatcaaattccaatatcatttgatccctcaaatcacgatttttcgttttagaattttctttcaaaaaccaacattttcctcaactcaaaacacaaattaaatgatgaaaattatgataaaatcatggaatatatttaattctaggtgaagaacacttacccgctcgattagcttgaaaatccccaaatatcgctcccaaatctgaagtccaaagttcaaaatatgaagaaaaatggctaaccctcatttatatgaatctgccaaaagttccgcacctgcgaccaacttagccgcatctgcgcaaccgtaggtgcgcatggcctatcgcacctgcgcccctttccgcttctgcgcccaagagtccgctcctgcagcgccgcacgtgcgccccaatactccgcacctacggaggctgcccagtcctcctcctttcgcacccgcgcaccattttccgcacctgcaaagctcgcacctgcggtcccctatccgcaggtgcggccacaccagaacagcagcaccatctacatttccatacttcaaacttcccgttaaccgtcctaaaccaccccgagcccctcgagacctcaaccaattacacccataggtcacatacaaatacatgaacttagtggacccttggaatacccaaaacaacatcaaaacaccaaatcaatcgcggattcaaacctaagaatttctaaacttctaaaattcgccatcgatgccgaaaccaaccaaaccacgtccgagtgacctgaaattttgtagacaagtcccaattaacatcccggagctgctccaactctcaaaattgcattccgaccatgatatcccaaaaagtcaactgtggtcaaacttcttcattttccaagttttgccgaatcacctcaaattagtctatggacctccaaaaccaattatggacgcgcgcctaagtccaaaatcatcatacaaagctgttgacaccacccataactcattccgaggccgtttacacaaaagtcaaacctccgatcaacttccatcacttaaacttcaaaaaataaaattttccttccaattcgactccggattatccgttaactgaattcaatcacgcacgcaggtcgatatacataatgtgaagttgttcatgaccttacgtgttataatccatattcacgtacgttggctcatgccataagttaatcgatgtaaacatgagaagagattatcttttagatgataagaagttaatcctattgatcttaaatgatacaagagtgtataagagtgattaacacatattagaagttaaacgaatcaaggatgttgtaactcatatttttgggtaaacctaggggtgcttgatattctcaataggtcgtgcttttaaggtatttgaatcatataatatctgtatcacagtcttgaagtaaaacgagttatgacacaaaagtcgacaagagttgtcgcaacttaggttcatagttttactaaaactttaggtcaaatgttattacgcttttctcccaatctaattggaattacagggttatattcctaccaaattgaagatttatgagtctagttttcaacgcattaaaccgtttatcaatacgatatcggagtagagagatatagacatttttgcgagactgcacaagttgctaggtgacaagtaggtgggtcacctacttggttaaatgatagcccaaaaagaggcaatttcaggtcatccaaagagcccattaaaaagattatctcctgaaatatatccctcattatatttcacaataagcatacctacacccctgcaaacttcctcccaaaaagtatccacaaaccctaattgatttcccccctctttcaagttcaaattgggggtaaaccctagagtttgaagaaccaagataagggctgagttatccaacaagtaaggtgagtttactgctctctttcacccattttttgtgctgtaagttcatggtaattcgtgagtggactgttttgcagacggtgatcagaagtcgtgagttcgagttattcacttgtagcggactgttttgcggactgttttgtgttgaagttgggctgcttgatttactactgtattgtggagttttggaggaggaagggtgtggagaaacaccatatagatttagggatgtgggctggtcgttcgtcgtaacatttccgggtcgtttgacacgacaacggtggtcgtcttatgtgtcacgacccaaaattccaccttcgggccatgaatgcgtctaacgttgaacccgctagacaagccaacgtttgaaatgaataaaactcgttaacaacaaatacgaacaagataactaaggcttcgatggcccaccatataaaatttaacaaaaaaaccaaaatacaacatagcacttttcgaaataaaacccataaacaaatcccagaacttgtgtcacctactcacggactatctaagagattactacaaacaaagggtctgaaataaatacataagactgtctttgaaatacaaggtaagacagagctgaaaatggaaagtagaaggtgacatcaaggcccacgaatgtctgcgggtctacctcgagtctcctgtgtgactgaatgagatgctccgatcgtcagtgatctccgggtccggttgcgtagtctgcacaacataaagaagtgcaggtgtagcatcagtacaaccgaccccatgtactgagtaagtgtcgaccctaacctcgacgaagtagtgacgaggctaggaccaacacaacctgtgcaattttatataatagcaggaaaaatggcaacagaaataagcaagtaggacagatacggagagaacaagctaggaagatggggtaacagtatgctagcacagcagtacaaggtaataaatgaaacgtaaagacaaggcaggaatatagcttctcaaacatataatgaacaggaaaggcacggcatgtcccctcgtgcataacctcacagtcactcggcacgggatgtcccctcgtgcatatataataacactcggcacggaatgtcccctcgtgcataacctcacaatcactcggcacggaatgtcccctcgtgcatatataataacactcggcacggaatgtcccctcgtgcataacctcacaatcactcggcacggaatgtcccctcgtgcatatataataacactcggtcaacacggcatgtcccctcgtgcgacgaataataaaacacaaggcaacaataatatgaaattcaacaacacgaagtctcaagtgcatggaaatattcaatacaattctattgtcccagcaaggagaaatcatcatttacaacatcacaaatgccggacaagggtctcagctataaccaacctcgcatcagtaatacaatttgacagtgtaagcctcaactggagcaaataactcaataacactccacgtcatgaaacaacatcaagtatcaattttaattcataatttactcatagtgcggggaatattaggaacatagcaaatttcatcacaattgactcacgggcatacttgaccgcaacgcataagcactcgtcaccacgcctatacgttggacatgagttgcacatagcaaataagactctatacctaatccctcaagctgaggttaagccaaacacttacctcggctccaaaaattgcaagtcaagcctcgatcacagcctttcctttagaatccgactccggaacggtattatctagacataatcaacccaagtaatttgaggaaaaattgggtatcaacagctgcccctctttaccctgttccgactatgttgcattacttatgctcatttagaggctcatagacaggtgtcggcttatgtatagtttagtatgccttgtcggatgatttttgttgtatagtctttcatggaagcgtggtagctcctaacttatatgtagtttcttggcagtgtttttatctcatgttatccatgttcattccattatcttttattgtttggtgttcataatccatatctaccacttatattgatctcgtcggcccttaaagataataagaagattagataaaatgtacgttggtgctcggcaagtatggccaggaccctagtcatgatcctccagtttgggtgtcgcgccccctttcttctatcgcacgggttaggtacggagagatcgggtttatgacattttggacaactcctttaaagaaagggtttaaggaagagtcgccacctaacgatttttatggtgcgttagggcacctagagttgataactcatgaactagttcgcgttaccagagattgggtaagggcttgaacttatcccaaggggaaggtgttaggcacccctcaagatccacaactgtgggtcccagccaataagttttgtgaatttggacggtgaacaagtaacaagtaaggttcatataagatgggatttcaaacaagcttaaaactcttttggaggaagtataaaataaacatttgaaaagaaattgtcctaggtttaaagtaatacggatcacttcaatgcaatacccggtatgtcacacctggaagaggaggctacacgtggtattagcgcaccggtcatcatatctgtattctacccttcccaccccgtaaaggttgttaaaaaatgtgtgtgttggttacgaatgcttattgcgtgccattacccatcccatcctataagtcctggagggtgtttaggactactagtcctacaaggcacgaactaggctgaacctttaggtttaacggataaaatactaggcgacatacaaaacaagtaggactgcaaatataagagaacatataaagacaaagaaaggctcacaggtccctccacacaaagacatgtaagtagcacgtctcaagcacgattaaagtctcaagacaggagttcaaaacaagaattttagtaaaataataggtcgtaggaatctaggttagaaaacttaatgaagacagaaaatttaatgaagactgatggttgattttcaaaatatacagtagtaaaggtagcggtaaaacttagaaatatgcagtgatttaaagctttcagaaaacatagaaggaagtcattaaagcagggatttgaagtaatatagtgattttaaaagataagtgactaaaatacagtagcttagaacaaagtaatagttgtcagtttacagagaacatatagtaaaagaagtagtgagatggtatcaaaatatagtaattttatcaaaatacagtgacttcaaaggaatacagagcaagaattcgaaatggcatgattttgagaggagtgaggcatctttgaaaacctaggagtttgaaaacataatagaacatgaatcagtaaaagggaaataaatgcacaactttgagattgtttaaattggaacaggagttttaacaaagtaaaatgaacttcagtgaggtaaaataggaatgggaacagcagggttccaaatgtttaaagtaactgattaaactagtagaacataattgatttgattttaatacgtattaggcctaaagtttgcctaggcgtcgtatacattgcctacctattttaaaagggtgagcatgcatgtatggattcttattttaatagatacgtgtttgcagggaattgttttaaatagattaaccatattttatgggagtattagatcatgttatctaggcgttcaagttctgataaataagaaatcctaagggcgggatatctaatgcacaaaggtatcatcttaaaaacatggtttctatatgtcatgtttatatgagcaatacattatgacaacctttgttactcatttagttgtactaggaacatggtgttagatggcgtgaatataatagatatgttggaatgaagaacctaaacatgattttttatgcatggtatgcatgtccaaagcatgatactattgcacacatagggaaataaagcctaagtcgtgatttctacccatactacactaaacatgcatagttccctcccatattcactatccagccccaatcgtttgtttactattacagaccatagcaaatgaattacagtaattgcaaagagaaaaataagaagttattttatagggagccttcaaacaggcccaatcttccagcctcaccccctttcgagcttcacagcctcacatagcctgggtgcggcaaagctcccaaaggcccttgtgagggccctggccaataccagcacccagcaattgccaaagttgagataggtgaagtgtagaattacttgcctcagtgtgtcaaagttcagagggaactcaaggtccctaagcaatgctcacactgagggggtggaacctaaaggtctaagagtagtgtgaagtgcaggaaggagtagttaaaaagagttgagtttgaaagggagttttgaaataacatggctttagagaataatataaagatcttttatgtaaaaccagtttgaaaaggaagcagtagaatggtcacgactcagcagatatgcagatttcaagaaagcaaacacaaataggggaaaggaattagggacaagtaatggtagcagcatatttgccgtaatcagtccttagaacaaagttacagattttcacatagtgtgatatgccaagagtttatcatatattatagatggagatacaaatctgagcatattaagtattatagatgcattagaagccaggcaattgataaagaaaaatacataaagagatgctagatatgcagacagaagatgtaaaagagtcacataagccataatgaatcatagagaggaaaacaggagtcatgttaggctagaagaagaagagagatcaaggaaatagagtagacatactagtaacatggtaggcaatagaaccatatgtaaaagcacaaaagaaacaacaagaatcataaccagaattgaaacatattgttttaggatgttgtaaacttaaattaggacataccagtgttaagagagagagcaaagcagaagagagcaatatgataacactattagccttggcttgcagccggctaataggcaagagtagagagcagccagtagagcaaagagagacataaagaaagagcacaagagagtagtatagtattgatgtgtgtgttcgtttgtttaatgaaagagcataagtatttatagttgaaaacaggtgatcacataaggtaagaatcacaaatgtatagcgataagagaaggcagaatcccaatcagtcaagaaatcaatggcacggttcccttgaattatgagattcaaactcagaagtggtaaagacatgcaaccacataaggtaaagaaaataagtaccatacttaaataaggaaaggatccaggccttttaagtaataaggaaactgtcaattaactaaggaatcaagacaatcattcccttaggtcaagggattcaaattcaaacggcaacacacatagtcatataaggtaagtgaaaatcagtcaaggatccacaaggagagaatcaattttactaaacaattaagaccaaattcagaaactccaattaaggagtgattcaatagaataaaaatattatagcaaataaaaacttaaacaatcgaatagcattctagggttttacaggaaccttccaatcaagcaatcaagtaagggagatagagtcagtcaagagagagttataacaccatacttcagcatataaataagtaagacaagcaatcgtagcaacagacatgtctagcaacgttgacagaaagaggcaagagatgaaccatcataggaatataatcacacggagatgccacaaacagactaagaatcattcgaaacatgataatcaagaaataggcagtaggaagaaccaacacaaaggtttaaaacaaattaggtattttcaccatgggtaagttaaaaagaagcaagagcatagaatcaatagagatatgcaaaggaaaagtttaaacataaggaggaaatcagttttaaacaagtgtagaaaactcagagaaatccttaataaaaaaaataagcaaaacgtttaaggctgctggatcttaaagattcagttgggaataaagtaagacataaagaaataggtaggaatcttcaagaataccagggatttagggagttgaggcaaaaaattagggtttcataagaaacctagagaaaataggagaacatgtcgtgaaactcaaagatcatggtagctctggcatagccatgtcaagaccccaccggagaaggccagaaacaacccaaacagtaaccacagcagctatttggcatgtttgaagccattgaaggcttcagagatgaagggatcagaaaggaggcgtcgtggaggctagtggtcgaaaggatggtggtcagaggtggccggagaagggagggagtccatcggagaagaggagccaaggaggcttctagagaaggctagagagagtaacagagagatagagagagatgaagagtctcaaaaatgagacgggggaagggggtaggtgagagttaattatggaaaggagggatctgggccgttgatcttatttgatcaacggctcagatttaattaggggtgggccgagtatggattaggattgggctgggtatttaattggggtttgggttgggattaatttggtttaaaatgtggctaaggtttaaataaatgtggctagttgttaaatacccgtaaaaatagataattaattaattaaaatagctaataattgtatacaaataaaattaagtaaaaatagctaaaattacaataattaactaatattaaaatgtaagacacataaatttgaattttaaaaggtataaaatgtctaattaggccatatttgcaaaagtgattgtaattgcaattaaataagacccaattggccaatttacgaaataattggattttaataagtaaaaagtgattataaatgctatactgaactggaaaatattttgaaattatattagagcacaatatatgaattattaaaaatatgaaatattaaataaatagggaaataacttagataaaaatatggaaaattaggaaaaatactcctatagcaaagagtgattttgaaagcttatatacaagtttgaaaataatttgaggaaaaattgggtatcaacagctgcccctctttacccgggaatgatgaaagagttgttgggtaaagatatggtggcaaattttgaccgagagaaaaactatggggtagaattaggccgcaccctggtttttgagctgcctacatatccctggttttacaggaatcaggccgtatgtagtttcgggaatcactggcaaagtatactggtgacggacggacgcaaggtgtaaggcaaggtaaaagtaggaaggtctgaagaaatatagtacagagataacaaaagaaaagaggaacttcagggtgctgccagagaaaagtgtcaaggaaagaagctcaccgagaagtccacgccaattatacgtcaaggacgagctctggatgaatacccagatgcacctgcctcagagcctgtacaattaagtacagaagcgtagcatgagtacataaacaaatatgtaccctatgagtatcccgtctaatctcgaagaagtagtgacgagaggtagacgtgatacttactagggtcaaaactaaataacataatttaataaaggataggcaggtataacagtcgtagtaatcacaaagacatgagatatcaagtatgaatttgcaatttcctttacatgacaaatttcactagcatgtaatgtactaaatttccttttcacatgaaacagtttatacaattacaactaaactcccagtcaattatatagcacataatatgccgaagcgtacggccgaagcgtcgcaaaaataaatgtgcactgccgagggtcaaatggctcgaaccataaatgcatctattaccccactcgcgaatcgaacatgcgacgcagttgacataatggtagggctatcccgctcacgaatcatacatgtgacgcgggtgccgtatacataaacaaaattatcaacatttagggatttaatagagattatacttaaaatcaagaacttaagcaatataatttttgaacataacttcctaatattctcatgccaattcaaggataataagcaacttaaaatacatttagggatacatgtaaggcacatataagcatgcttgtgagtcctaaaactacccaacacaatatactagtagctacgcacggactatcgtcaccttgtgcgtgcgtagccccccaccatttaggacatttcaatcatttataatcacctatggggacttttccctctttcaaggttagaagggagactcacctcgtgtcaaacctactctccgggtcaagaacgcgcctgagactccaaactcgtcacccaaggactggaaactagtcaaatgttacacaaatacatcaatttatgctcaaaagtatggaattatcctatttacttagttatttcatcttactttgaagaatcccaaaatacacccccgggcccacatgatcggattccggaaatttttgaaggaaaaacttacccataacctaaggatcaataatatatagtttttgtatgattccttggcaaattcgttggtaattctcccattttttcataaaatctaggtttttactctaacccatgattttgctctaattagtgtgttaatctacctaaaaatccaagtatttaacttaaattatagtgggaatcacttacctctcagttgttaggtgaaatctcctctttgaaagctcccaaaatcgccccaagtaaagaaaaatggcttaaaagggactaagtcccgtttaaatccaacactgcccaggtgccccttgtgtgcaatcgcaactggggcagtgcaatcgcagaaatcagctggcagggccccctgaaggcctacagtgcgttcgcagaaggtgtcgtgcgatcgtggaggctagctaggctaggcttatacgatcacgggggagtggggtgcgaacgcggagaacaaacactgggccaggccacaacttaccctgtgctaacgcaaacaagcccttgcaatcgcatagggcattttcccactcctgccaactgccaactccttctaagcgatcgcatgagtgtacccgcgatcgcacagaaggaaaccagacagtgaaaatctggtgttttgaaattagctcctaggggtctgaaactcacccgagcccctcgggaccccgtccaaaggcactagcaagtctgtattcatgatacggactcgcttgaatttttggaacatgaaaaacaacaacggaactaagattacgaccccaaaataagatttcgaccccaaaaccaaattgaatcaaactttgaacttcaagttctagaattctctttcaatgcgttgaactagcctatactactcgaaatgacacaatttttcatgcaagtcataaatgacataaaggaactattcccggtctcggaatttcgttcggacctcgataacacaaaaacacgttccaaacctaaattcttaaacttaaggaatcatatttccctatttggcgccaaaatgctcccgggtcatccaaaacccgttccggatacacgcccaagtccgaaatcatcatatgaagttaccggaactgttgaaactcgattccgaggtcgtttactaaaaatgttgaccaaagtcaaagttggccttaaaggcccatctcactatgcaatgctctccagaagtgcgaggtgaattgaggacctcgatatgatattatggacaccggcacaccgtgcagccggactatctctcatatgtagatctgggccaacctctcagaagtgtatgtagtagctacaggaatgaaatgcgccgatttggtcaatctatccagaatgacctaaaccacgtcgaccttccgcaaagttcgaggcaacccaaccacgaagtccatagtgatgcgcttccacttccactcaggattgggcatctgctgaagtaggcctcctggcctctggtgctcatacttgatctgctggcaattaagacatctaggcacatactccactatgtccttcttcatccgcctccaccagaaatgatgtttcaaatcacgatacatcttcgtagcaccaggataaacagaataccatgaactgtgagcctcctctagaatcctctccctcaggccatcaacattaggaacacataaacgaccctgaagtctgagaacaccatcctcgcacttagtaacctccttggcaccaccctgaaccactgtctcccgaagctctactaggcacggatcatcgaactatcgggccttaatctctcccaacaacaaagaccacatgtgcaagaacttggcgaggctctgaaaggtctaatgtcactaggcgattagccaaggactgaatgtccaaggctagaggtctctccactgctacaatataagccaaactacccatactctccgccttcctgctcaaagcatctgctaccacgttttccttgcccggatgataaggaatggtgatgtcataatccttcagcaactcaagccacctgcgctgcctcaaatttagctccatctgcttgaacaagtgctggaagctgcgctggtctgtataaacctcacatgacaccccatacaagtacttgggcatgccaggagccagcgtcacaagtctacgggcatctaatagaaaagagtatccaaaaggaaatacaagtctgccctactttctgaagaaatatagtacaaacataacaaaagaaaagaggaactccagggtgctgccagagaaaagcgtcaaagaaatcatctcaccgagaattccatgccaacttacgccaaggacgagctccggatgaatacccaggtgcacctacctcagagcctgtacaattaagtacagaagcgtagcatgagtacataagcaaatatgtacccagtcagtaccccgtctaatctcgaagaagtagacgagaggtagacgtgatacttactagggtcaaactaaataacataatttaataaaggataagcaggtataatagtcgtagtaatcacaaagacatgaaatatcaagtatgaatttgcgatttcctttacatgacaaatttcactagcatgtaatgtactaaatttccttttcacatgaaatagtttatacaattacaacaaaactccgaatcaattatatagcacataatatgccgaagcgtacggccgaagcgtcgcaaaaatgaatgtgcactgccgagggtcgaacggctcgaaccatagatgcatctattaccccactagtgaatcgaacatgcgacgtagttgacataatggtagggatatccctctcacgaatcatacatgtgacacgagtgccgtatacatacacaaaattatcaacatttaggtatttaatagagattatacttaaaagcaagaacttaagcaatataacttttgaacataacttcctaatattctcatgccaattcaagaataataagcaactcaaaatacatttagggatacatgtaagtcacatataggcatgcttgtgagtcctaaaactacccaacacaatatactagtagctacgcatggactctcgtcacctcgtgcgtgtgtatcccccaccatttaggacatttcaatcatttataatcacctatggggacaattccctcttacaaggttagaagggagactcacctcgtgtcgaacctactctccgggtcaagaacgtgcccgaaactccaaactcgtcacccaaggacttgaaactagtcaaatgttacacaaatacatcaatttatactcaaaagtatggaattctcctatttacttagttatttcatcttactttgaagaatcccaaaatacacccccgggcccacatgctcggattccggaaattttttaaggaaacacttaccaataacctaaggatcattaatatatagttttgtatgattccatggcaaattacttggtaattctcccatttttcagaaaacctatgtttttactctagtccatgatttttctctaattaatgtgttaatctacctaaaaatccaagtattcaactttaattatagtaggaatctcttacctctcagttgctaggtgaaatctcctctttgaaagctcccaaaatcgccccaagtgaagaaatatggcttaaaatggactaagtctcgtttaaatccaatcctacccagctgccccttgtgtgtgatcgtagctagggcagtgcaatcgcaaaagtcagctggcagggccccctgaaggcctacagtgcggtcgcggaaggtgtcgtgcaattgcggaggctagctgggctagacctatgagatcgtggggaagtggggtgcgaacgcgtagaacaatcactgggccaagccacagcttaccctgagcgaacgtagacaagcccctgcgatcgcacggggaattttcccactcctgccaactgccaactccttctatgcaatcgtatgagtgcacccgcgatcgcacagaaggaaaccagacagtgaaaatctggtgtttggaaattagctctgaggggtctgaaactcactcgagcccctcgggaccccgtccaaagtcactggctagtctgtattcatgatacggactcgctcgaattttcggaacgtgaaaaaacaacaatagaactaagattccaaccccaaaaccaaattgaatcaaactttgaacttcaagttctagaattagctttcaatgcgccgaaccgacctatactacttggaatgacaccaaattttgcatgcaagtcatgaatgacataacagaactattaccaatctcggaatttcgttcgaacctcgataacacaaaaacacattccaaacctaaattcttaaacttaaggaatcatatttccttattaggcacagaaatgctcccgggtcatccaaaacccgttccgaacacacgttcaagtccgaaatcatcatacgaagctactggaactatcgaaactcaattccgaggtcgtttactcaaaatattgactgaaatcaaacttggtcttaaaggccaaccttaaggaactaagtgttcctataccattccaaactcttccaaatcccgaaccacccgtccccacaagtaataaatcatgaaaatccactacgggaagtctcatttaagggaacgggttactaatacacaaaacgaccggtcgggtcgttacaacaacctaagcacaatgacctaaaatggaaatggtcttgtaacaatagtcccacaacaccattgtattcactccataagaaagtggcatctatcgtggctaatgaacgggaagtaaaatcaaaagtaatactcgagatcctatgaagttgcacgaaaattccgccatgcgtgggaactaagataagctaagtaggcacgcaacaaggaggcagaaagactaggaaaagtaatagcttacgtttaaaggaagctgagaaggaacggaaggaattatttgatcaatgatccagagttagttacgttctgaacccacttaagattttggagtattatccatacagcatatatgtacaattatacacccgtagaagactctggtataagttaaaaggatagaattgagtccaagtcatagatcaaaaaatgaattgttagatgatggtatcatgaatattccatagcgtccattaaagcctaaagtaataactaataccatgattgagaacattgcaggatcactcttaatatcagaggtacaagagagatagtacagtagccatattctataatggctctacgataaagccagttaaaagagtaccagcctcataagaagtcagtatgaagctcccaccggattctgtatgcaccagaggtgcaagtcattataatagagctttaaattatagatgtgaattatacatatgtggaagggaggttacgaaagaggtaaaagatgttatgcgagattttaaggtaagtaaggtaaaggtgaacaacgtacgagatactcaaatgaaaggtcgtaaatggtccatactttggatagaaggctaaaagcgttgggattcagtatccaggaatgatagtgtcatcgtcagtggtatatctttcagcctttctaggtatcgagaagcctgattaagagagtaaaaaaagagttagagacgatgtgatatctcgcttgatgttctagaatgacataaggaaatctatgatgcaaacatgttaaaagattgcgagtaatataaatagatatgtgtaggtcgcaagctaatatatggtgaagcgacaaggttctaaaagacaggactaaggataggaaaggacgagtgagaaggtgacgataatggataagtccttgtgattaagcccatcaaaacaagagagctgatggtttctctaagttatagagagctcagtatagcctaaatgaactcaatggagtctaagactagtagcatttagaagagacagaatgctgccctggtaatagaatgagggtgtaattgtggtaaataaaggatgatgtttgggccttcaattaagtaatgatttgaagagaatttcattaaatttaaaatactgacgtaagtgaatcacattgggatgctataaaaatacgattattaaagtacaatatcgccgctaagtggatcaagaaaaccacttcaaattcctcgatgcacgtagacctagtggcaaggtattacgcaaaacgtttcaagttgtccgtggtatattgtagatcaatattgaggtgaatcaacaacggatggacaaaagtcacaaagtataagatgagactagggcgtcattcttaaactataatgaggaagcattaaaggacttagatttatacatatgggataagcaatgaaagtaacctggagttcagtagcagacatcagtaacgataaatcgaagtaagagttatggcatagtatgacctacctagatgcagtaaagtcattcgaatggataaccgggcctatgaaataaaatatagcaatactcctaagtataacgaagtatcgagcaaagaacttcagtatacctataaatgcccaaagagacatcttttgaagctctgtatatgcttacaaagtgacgcctagagattggcaaaaaactggaggaaaaggaagagaaaaataatagatatgggattttgcactcttaaaaaaatgtgacacatatatccactcttaagaaggagtaatatatccattcttaacatttcctttcttaagaaacgtgagagttatatagtcatatatccactcttaagagagagagtaagatatccattcttaacatatcctttcttaagaaacgtgagagttatatagtcacatatccattcttaagaaagaattacatatcctttcttaagtacgtgagagttatatatcaaaacgtaagatttgaaaattataaggaagcgtacggtgcaatctttctcaagaataacatagggattttctcctatttcaatctcgtcgttacgtgtttcaccgcgattaacgtgtgttagagggattgtcaagagaatcgactcaggtatgttaaggctatcccttctttctttttggcatgatccaaataatacaaatgaaacgagcaaaatatgcaactttcataaatgactctattcatggaaatactaggggtttctatattcttgattccccatgtgaattattattatatcttctattcaagggtctcagaaaaatacgtaaaagtttatccgaaaggcatattgatttttatggcgttccgaaaaaatcttattaacgtatttgttatgcatttcatgcatttatacatgtacattgaccatagttgccgaaatgatatgatgggatgccctcagaggcttgatcatgttatgaacgcctatacatatgcatggtatgacatttatacgcatatgcatgacattataaaaatgaaatgattcaaagagctatacaaacgtacatgtcgagtcttttactccatgtttcttccatatatattatttactgattttcattccttacatactcagtacattatttgtactgacgccccttttgcctggggacgctgtgttttatgcccgcaggtcccgatagataggtcgagatccctccaagtaggtatcagctcagcggaagatgttggtgcgctccatttgctttagagtttcttgtttggttagtatgttttagacatgtattgtttggtatggcggaattatgtcccggcctttatgaaaattatgtattcttagaggcttgtagacagatgtcatgtacgtaaacgattatatggccttgtcagcctatgtttaatgtacgggtggttattttggtcttataggcccgtatgtcttatgtataggttggtattacatgttgtattctacttatctcacgacagccttccagctcagttatctatgatagtatgaaatgaaaagatacgttatgttggtacacgattgagtaagctatcgggtgcccgtcgcggccaccggtttgggtcgcgacaaaagtggtatcaaagcagttctgtcctagggagtctacaagccgtgtctagtagagtcttgtttatggttgtgtcgtgaaccacacttataagcaggaggctatagggcatttaggactgacactttttcttcttactctagatcgtttggtagagctcagtttgtaataattcaaattcctaacttctattttattcgtagtaagacgatacctacatccagaatgacagttggtaagagattgaatgtgactatggaagagttaagttagaggtactcaatttttcatgatgcttatgataagtatataaggtctttaggagatcatgtgtgtactaagatgtgtaagcctcttgaaaaggagccttgaggcaagaatacctatccacctttgtggtgaaagacgatgagagattatgaagataaatacaagtttcaacaagcaaaagaagcaagatgaataagggtacgaggcgcccagttaatgttaacaatatttacaattcagacggaggaatataagctttttaagttacattcaacagtaacagaggtatgtacaattggctacgtcgatcttagttatgccctatgagagctaaccgatatggtttgaagagaaggatgagatatcatgatccgactggggttagagtgacccaaaatggtggatgaattgtttgcgttagtttaccttcctgaagatattacaaaggtgctaatatatctccttgtgagacacccagatggtgcactctaaaatagtacaactagatatgagtaccacaaagatgggcactggatgcctggaagggataaatattatcttagtatggatcccgtccttagaagagagataatgctagacaacccgcagagctagtggatggagcaaaagggagctaaaagcaaaagaatatcttgttgaagttttcagaataaagtgatagacagaaatgttagcaagaaataagaagagagctaatcaagcattaagagtaagatgtgatacatgtatgggaatggtaggtcaaaagatggcaatattacagagtctatagtcaagtgaaggaaaagatgagaattgacaggccttgagacaacaaaagagtataggccataaagtcatatcctcacttcgagaaatcagttcgtgactccaacgcaactaccggaaggaaaacttaggccccagaataatagaaattagtatgggctggtgaacaagacaaactaaacgtgagttagggactaagtgattggataatagtaggcatcatgagagtttcagattttgttctagcgataatagaatggacaacagaagaagattcatgagaaattcagagaatggttattcaggaagacacttccctaaagcaagcaatgtgaccaaagttaagcttaagggacaatgtgtgccagttacactaaggcctcatttgtttttcttaagattaagacgtctgaatctgaatacacatctgaatatcaagatgtgtattaagactaagacctctaaatctgaatacacatctgaatatattaagatgtgtattaagatctgaatagaaataattaagattgtttgattttaacatctgaatgtataaaatttatctttatttgaaaattaataaacataaaattcaaatgaaatactagctaatctaatattctatcaataaaatatatagttttttaaaatatgatagttggtggtggtgatggctaacgggtgaatgccgactagaggcggtggttggtggtagttttggttgatgatggtggttcatgctagtagctaatagtgattggtagtggtggcgattatgatcgaggatgttggtgggtggtgatagttaataatggcgggtagtgattgtagttgtgactgagaaaggtggtgggtgagtggtggtaggttataataatgggcagttgtggttgttgatggtgatggggtgatcggttgtggtagttgaggtggatgagtgttgattgtgggtgagaatgatatatggtggtcggagtggtggggatagtgagtggtgatggtcgataatggtggaggctatgattgaggatgatggtggcgtggtggtggtggtggtgaggggggggggggggttgagtatggtggtggtggggttgagtatggtggtggtggtggcagggcagtagttgatactgttaggcagtggcgcagttaataatgaatatgtgataccacttaatgaaattaagtctctattatagatcttaatcatacagacctattcagacccattaagtgattgtgaagtaaaaaaaacaaacacacttaatgatgaagatctgaataattaagattcagactttaaaaacaaacgcacttaatgtctaagatctgaatgattaagattcatacctccattaagtgcaaacaaatgaggcctaagtgccacccgcgcgagtaaggaatttccttatccttggtatagaaagattatcgcaaggagagtaagggtcatcgatagtgtgagaagacgccaatgatgaagaggtaaagcatctataggttgatcatcgtagcgctaaatattagtacttccctaaaggggggaatatggagtgatgtagcattaaatcagaattaagtggctctagtaattatgaaatggtaaaggaagaatgcggtaaaatgaaaaagggatgagattgcacttattcaaagcctacagatatgctacgataccaaagcattatgcaaacacgacgtcaaggagaggaagtaagggttcctacccgagatgttattgattaataaggagccagtgcgagaggtaagttaaaacaaaggaaataacccaagaaagattacgcggaatattgatatgagaatgggccaacgagtagttagtagttgattcaggaagtgcctagttatggctagataagaggatacataaaaatcaatagatcgtgcaagataatagagtgaaccttaacatgggaaattcaatctcgcaaatatgacatcgtgacccttgagaaatattcagataagagttgggatagttaaaggtatcatatgaatgttatggaaataaaagagagtgtcactgggaacacagtcaaaagatcagttcataagcaacactacaagcacaagggcgtggaggtaagaactacagataattataggtgtgtacgaacatcaagaagtccatcgggtatgtgatgtaataagctcgcagctttacaagattcagaaggtattccctaagtactacaatgaaagactagctgaggaaataaggaagaaggcttgaaccaaatcacattgacctaaagaggaaatggtattgtaacaacagtcccactacaaaattgtatgcactacaaaagtaagtggcacctaccatggctaatgagtggggagtaaaaccataagtaatattcgagaccatatgagttgcacaaaaatttcggcatgcgtgagaactcagataagctaagtatgcacgcaataagggggaaaatagaccaggaaaagcaattgcttacgcttgaagaacgctgaaatggaacgaaaggaattatacaattaatgatcctgtaaaagactccggtataggttaaaagaaggaattgcgtccaggtcatagacaaaggatggaatcaatagaagattgtatcatagttttccatagcgtccatgaaaggctagagtaataactaaatgccatgagccacatatcgaaagatagcttaagcctacatttgcttctcaaattgatagtcataatcctcctaactaccccaatcatgccatcattaaaaggtagttctactacatcttcatcttcactcacacatctctcctctttctcacatttattactcttgtattctctactcataatcttcctagccacaccaatcataccagtatgaggcagttctacatcgtcttcatcactcacatccccctctgcttctctctcacttttttcactctcatatccctcatcttttctaagaatgatgtttcttctacttgggcgaatgcatcatatgtccccttcctttacatttatgacattgaatagaactagaagatgtagaaagtttggggttaaaggttttacctctctttttgttatcaaatttgcctttaccattgtcttcttgaggtctagaagaactatgcgtctcttgattcatccatggcttcttagagatggtgtttgatcgacctttccacgagctagttttctttattttattttgcttttagacctttacagacaaatcagctaactcatctattgttatatattgttgtaattctactacatcaactatttccttatttaaactatttaaaaacctagccattgtagcctcttcttcctccgtacaattagcttggataatagccgtatctatagccttatccacagacatgggcccttgcttcaatgtttgaagacgttgttgtagctctctttgaaagtgtaatgacacaaatctcttcctcatcaccctctttatctcagcccaagtagatactggtgcttatccttcttgcaatcaatccctagtaaggtttttcaaccaaatagcagcatagtcagaaaactcaaaaacaccaagtttaaccttcttaccttcaaagtagttgtgacagtcaaaaatggcttcaacctttctctcccaaccaagatacaagtttgggtcccttgttcccttaaaagatggcatcttcatctttatactatttatattgtcatcttctactctacctctttgtcccctcctatctcttcccaccatatcaaaatcaatatcattaaagtcatctatagggttttcttgatttacaatgggagtaagggatacatttctcctagcttggggcctaacattatttcctcttctaagttcagttgttgaacaaaatacattgtagatttataattaaacccaactcgtatgaatttctttgtagtaaatagatttttggggaatgaattaaagaagaaccaaatcctagaactagtaggctcggttgaaacaagacacgaacaaaaaggaaaggattgcatacttcgatgagaaagagtaagaaaattttaatttttcttatctttgaaatcttggattccctcttcttgtttcctttgttaatttttggaaacaaattaaatacgaaagaaatttcatcgaaagcaagcaatacttttcttttttaactgattttcgttttcttttttcttttgctttttttttttacttttttttcaagttactgttcacaatgctgcagtaacgttttttttttctttttttattcttagtattcaagaaatccaaagaattatcaaagaccaaaatcttgatagaaccgctctgataccacttgataacaaaaaggacgggaatccaaactagagtaagaatttgagaagtaaatgagaaagcactaacaataaggaattgaacgattagaattcagggaaagaattccaagaacttccaagaatgcaagttctatagccttgacaagatccaagcaacaacattttgatttattaaagaaatcaaacgccttaactttaagaacaaatcaaaaacaatagattcggatcttaaccgttttacgtgtaacttgatataacaattaataaccaatattaatctccttctaagaataccacaaaaaaatcaatgatatcacaataaagaagttatcttactaccttgaactatgaactagtaaagtgtaacgacccaaccgatcgttttgcgtattcggaccctgttcccctaaataagacttctcatagcggcttatagtgatttatgacttgcgggaacgggtggttcgggattcagaagtgtttagagcagtataggaacacttagttccttaaggtttgcctttttggccaagtttgacttcggtcaacatttttagcaaacgacctcgaaatcgagtttcgatagtttcggtagcttcatatgatgattttggacttgtgtgtatgtccggaatgggtctcggattactcgggagagtttcgacgccaaatagcgaaaatagagttttcttaagttcataatttggtttggaaaaaacccaaaaaacactctctagctttcttctctggcgagttttttgtgaggttgggcagccatggctgcgttgatctctccccagccttttgctgtgggagaggtaatccaaaataatataggaactgctccaaatcataattcaaatcagtcttacgctacaaaacttcattcaaaacagtccacattcttgccgtcaaaaatcgagttgttcccaattaaactcgaccatggagaaccaatgatagaattcacaatggaggaggttaatgatttcattagggaagaagggctgcatcaggcagtggtgatgaaatattcctatggaaaacctgatttacaggatatcagaaggatttttgcgtcgcaatttgacgtgcatggccactgtaacgtggggaaattggattttcgtcacctgttgatcaagtttgatttatacactgattatgttcagtttttttcaaggtcgactggatatcttaaacacaaaggcgacgattatttctttagaactttcccatggacgctaggataaaatccgaaagaagagacatctatggctgttgtatggatttcactaccaggtttgccacctaatttctttgcaaagaggtcgttaatgtctattgcgtcagcagttggtaaagctcttgctatggataaggcgacacaagaaaaaactagacctaatactgctagagttaaggtgataatcgatcttcttggtaaacagcctaaaaaggtgaagcttcagattgttgatcgaattactggtaaacaggttgtgcactatcagaaaatagtgtatgacaatctgcctaagtattgcacttgttgcaaacatcaaggacatgacaaaaaggtgtgtcgagtaatgaaaacacaagctgaaacagaggtgacgacagagaaggtgaatctggacagtgttctgccttttaaggatgttactaattttgacaagttgcaaggggatgcaagggactatttaaatgctaaaagagctggacaaataagtaaggatttatcaaaaaaagatggtaaacaaggaggtgaaatagcaaaagaaacactgatcgagcagcatgttagtaaggggaacaatgagactgtggaaaatcaagcaattaaaggtgtgcctatcgtgcagcatgtaatccaaacagaggaaagagcacaaattggttatgtggataataatgaagctgtgaatcgtgtaggtgatgataaccaagtaggagctgcttccatgattggtaagggtgcacctaaacctactaaggatgttcctgctacaacaacattagcaaggattctcaatgttgttaatccaattgtgaaagcttatgacaagcagaatatggctaaaactggaactggtcgttctacaaaaatagaaagtgatcctaatactgatcgagatgagattgttgcacgaataggtaatgtagagtatggtttggcagagggagatcgagtaacagctggtgttgaacagattttacatgttccatgtgataatgcagtaacagatattgtggtgtcaaacttggaaggtactgttccattgaatgttacaagtgatcgacttgttgctgcggttactactaatgccactaggattatggacatgcaagacggtaagcagcttgatcgagctgcatcagtggttgatggaaaagggcagaatatattgcaacaaacaactcctactaagtctaaagatggtactgtttcgttagaagtaggtgcacgatttgtcacacctggtattcttgaagcatctgtgcaaacagcaggaggctttgagactttagattgtgcagctgttatagcttctaaggaggtgaaaaattctaatggaattgtccagactaatactagagtgttgaatcctactgctgctttgaaacctattgttgggacgttgaatgatagtgaagatcgagttgatactctaacaaagctgggaacaaaactattgtaaaggataaaaaagatatggcacatgatcaacataatgcagcatctattaatttagttgataactcaattggtcctaaagttacaactaggcaagagcgtgaagttttggttgctgctataggtggtaatcaagttacagatgcaagagcaaaaactaatgaaataatgcagcaatccagtcatgtaaatgtgaacaaagaagttggcaagatgattggaattacaggcaaatctggacaaatttcaatagatgcagcaaacggttgggcagtagttaatcgatcaccggacaaaaaggtcgcgtcaagtcttaaaaatctggaaagtgcagaagaaactatcaggtgttctaactattatgatacattggccaatgcacaagactatggtgaaaatgatgagcagattgctaacacaataaccttaaaaggtagttcttttcaccatcaaatagttccagtttcaagcagtaacaagggagacagaagcagcgacaaattggctaacttttggggtgttcgacaaaatgctataaatagcagtgtggcagaactgttaaagggggatcatgtacatagttccagcactcctacgcttcaattttctagtccagaagtggagcaaattatcaaacaatcacaggttgaaatgatgttgaatgccaatactattttcaagcaacctttggtcacattgaacacattggcatatgacattccctctcaatcgtgcgagtcatttggtgaacatggggtgaatctgggcaacctatacggtctacgggaaacaacaatgaaataataaaagcaaacgtgagggagatggcaattaaatccaaattgtgtgctgaccaacgagaggatgaggatgatgaagattggggtggtgaatttgccggggattcgactgatgaaggtgagcgatgtagtggagatgaggaggttgcctcacctgctttgccaaaaattggcattgcttcaaatttgaactcgagcaacaagctcaatgcaaaggctccagtttttgtccctaaaaatatgcaacaacagagtggaaaactaactgagctgcagcaggctattgtaggaagctcaaatgcacttatctcaactacaaatgaacagcagctcaatcaaaaaagtcgaaaaacagcaactaagaaacctgggcagcaacagttgaatgcaaacaattttggagcaaaatcgactggacagcagcaggtttttgcgaccacttcagctgctatttgtgtggctgatcaatatgcaccaacatcatcaaatcatggacagaaggtacaaattgaaagctctccagatgcagaaacttcaacaccaaaaactggacagcagcagtttggccgagctaccagtcctacaggtgatcgaacagtagcaacattaaaaacggggcaacaacaaattgtgataactcctccagttatttctttagaggaaagagaactcttggatgcaatggtaagttccaatcctgcaacctctctaaattataatgtagttagcactggtcgggtgaataagagcaggaataaaatgcaaagcatagcacaactccaaaacaaaaacaggaaggaaatagtgtgctaattcaagaacttgttcaagacatgccaaatccgataattgtgggtagagatacgtatgaagagggcgaggaagaagatattttaaatcaatgtagggcagaggcatcaagaaaaggagatctatcacctatgcatagcggtaaaaggaaaaagacacatacaagagaaaaaagttgggacggcagggtgagcgaagatgcaaacataaggcgactcccgatgagagttgccaaacaaaaacaggtttatccaactacgtcaacaaagtccacccgctcaaagaagaaagtatgaaatttgaagacattttgaaaagggtagaggatgaagacaagtgtgtacaagttgaagacttcacaaaattagagatgagagagcaacactgttacttctacatatttctattttaccatcacattagtattgtcatttgtaatatcatcacagagtatgttataaactctgtgatgatcatagaatatttggttctttctagttcttattttttacatgcatgcaagtaggtgaggctttttttatgcctcgataggacttagtaaggtaaggtttagccccgtttgtgttgctttagtcctatgcctctggaaaatatccaatcggctatgagattatatgccctcgtgagactttgccggcagctacaccatgactcctctacatgaggctgccatatagggcattgtgaggcgcagaggagtgattatatagccgaggcataaagacaatgctacgggtgctattgtctcctcttatttgtactattcctatgtggttcttttttcattttattattaataaaactagccctaggctcctcgcctagtgaatttgctttaaaaaaaatttggtttggaacgtgtttttgtgctatcgaggtccgaacgaaatttcaagaccggtgatagttccgttatgtcatttatgacttgaccacaaaatttggtgtcattccgagtagtataggtcggttcggcgcattgaaactgaattcaagaacatgaattttcttaagtttgattctaggggttttgaggtgtgattttgagttttaacgttgttttgggtgttacgaaggctcgagcgagtctgcaatatgacttaggactttttggtataattgcaagggggctcgggtgggcccaggtgcctcccggacaccaaacggggcaaaaaaccagcagcttcagctgctggtgcacttgaactggggtgaccgcaggtgcggttgcctagtcgtaggtgcgaaccgcccctgcgatcaaggcctcacaggtgcgaccccagggaagatggtccaaaaccgcaggtgcggacctttctctgcaggagcggatcgctagtgcagaaatcctttcgcaggtgcgatccccagcctccttgccaacttccgcagtttcgcaggtatgagaccgcagatgcggtcctcgagctgcaggagcgagatcattgaaggcagtgagctcatttaatacgggacttagccatttttcaccatttcttcttcaccataggcgattttgagagctcacaagagggtattcgacctagctgctaagaggtaagtaacttccacttcaatgtatgtttaatacatcaattactaagtagattaacactccaattagtgtaaatcaagggttagagtgggaaacctagggttgatgaattttagagaatttcatcatttatctaccatgaaatcatgcaaaaactatatattaatgatccttaggttatgggtgagtgttttctttgaatatttctggaatccgagcgtgtggtcctgggggtgtattttggtattcttcaagtagggtgaattagctaaactaataggagaatttcatactcttgagtgtatattgacgtatttatataacatttgactagcttcgaaacctcgggtgtaaagtttgtagtttcgggcgcgttcttagttcaagaagtaggttctacgcgaggtgagtctcctttacaaacttgtaagagggaattgtccccatagataaatgtaaatgattgaattatccttattttcgggctatgcacgcgcaaagtgacgagagtccatgcgtagctactactatgctatgtcgggtagaatttaggatttcacaagcatgcctttatgtgccttacctgtatcttcacatgtgttcctagttgcttattatctttgaaattgacatgggggtattaggaagtcatgtgtaagtttaaatgcttaaatctctgatttcaagtataatccatgataaattcctgaatttcttgataattctttgtatgtatacgagcacccgtgtcgcatgtatgattcgtgagcggggtagccttataattatgtcaatcgcgtcacatgatcgattcgtgaacggggtaatagatgcatctatggtttgagccgttcgaccctcggcagtgcacatttatttttgcgtcgcttcggccctacactttggcatactatgtgctatgtatttgaccgagagtcttgttatttttaactaaatatcttcatgtggaaaaaggaacttgggatttttgtgacaattgttatttgacccatgagaataaattgcagttttatataattgatacttcatgccgtagtgatttctatgactattattcctgtatagatctatttaatcatgttatttgttattgaccctagtaagtatcacgtctccctctcgtcactacttcttcaagtttagacgggatactcactgggtacatatttgcttatatgtactcatgttatgcttttgtacttaattgtacagcatatgaggcaggtgtatctggttatcagaccggagcgcgatcttgagagcatactctggacttgacttcacggtgagcttctcctcctggcgatcttcagcagcaatgtggagttatctatcattttggatatttctgtctattctcttcaggcaatagtacattcattttgtctattcttgtatattctactagtcgcctgtggacttatgacactagatcttggcacacgtagtagacactctaatgtttttgctacactgtacatgctggcacatggttttgaaacttcattaaattacgttgtctcgcttaatcgccttcatttgatgatttttcttaacttaaaatttggcaagtacttaaatatcgaactaagtgaagtaacttcggtagtgaactagtgttggcttgcctgactcctgtgttgggcaccatcacgacttgagtaagaatttgggtcgtgacataaatgttgaaagataaatctaaaaacataagtaacaaaggttcaaaagaactctcaaagtataatattattaatcaataatcaagtaccacaataagtttaaaaaactcctatttataggagtaaaaaagtccttaaaactaggtagggtggcggccaaggaaaaccctaacttggaggctaagctaaatactagaaaaccttataaaaataaaatgacgagtggccaaatccctttggggaggatttgggccataaaactagtaggttgagccattgttttggactccttttgaaacacccccttttggacctcttttaagatcattttaagctcttctaggtgcccttttggtgtacttcaagggcttatgttgggacacaatattcctcctattggacttcaatttgggccagcaaataattgtaaaacttggacaattcattgcctttggggttgagctcttcctctagaatcaaaagcttatttatttgccattgaagtgcaacaaccttaatctgcaattctttagcttgcgatcttgtaaatggccttcttggagcttccaaaactctatacttgtccttgatgatatcactaaacaatacacatccaaatcatactgaccaaataagcgacttcggatcaaatagagcgcaacaacatcttccgttgagctgatggtcaactaggatgactctcgacctgtctatcgggacttgtggacatgaaacgcagcattcccaagaaaaagggacgttagtacaaatgatgtaccgagtatgtaaggaatgaagatcagtaaataatagactgtcatgaccccaaatcctaacaggtcgtgatggttcctatcgtggaactaggctagccactgtcacataattacacaactcctttaataaaatttaccaaaattcatcaatagcaagtataaaatcttctaagtctttaacaaatcataatataatctaacagtctaaaaccattccctagaactggagtcaactgatcacgagcatctaaggataatactagcactgctaatgtcataaaataatgtctcagaacaaaatactaaatactaatgaaggaatggaaattgagaagttgtggacgctggtcagctacctcgaaatcccgaatgctgatgccgaacggacgcaaatgactactactcagaaccaatacctggatctccacacaagggtgcagggagtaatgatgagtacgccaactcagtctgaagataagaatcacacagtaccaaacatcaattcacaaatagtaaaaatactgagtcttaataaagtaaacatctagtacatatggttgaaaaccaatttccgtaaaaatcatttgaagaagtatattctcaaatgtttctcagtaaactcccaaaaatctcaatataaaaaaatgaagtgaatcataatcaaaagctcagcaaaatatcattataaactgcccctcgggccagatcatcactcatactcagtcactcagcaccttaccatcactcagtaacagtcactcagcacctcacagtcatccgtacctcccaatcacttgtcactcggcactcgcactcagtaggtacctccgctcactggggctgtgtacagactccagaggggctcctacaacccaagcgctataaacagcctaatcatggcatcaatcactcaggcactcggcctctctcatatcataaatatcctcacaacattgtccctcggcctcactcagtcagacactctcaacatgccactcgggccataaataaacgggttctcgacccaaaacagcatttcatttcaagaaatgataatatcacaaatctgagtgtcaaacaatttaacaagaaagactgagtgtaaaatcatatttattacgtgagtaatattagaaaatagccccaaggggtttaaacagatcgacaccaagccccaaacgtgacttacaacccatatatatatcaagaacatagtaatactatttaatatattatttaaaagcagtttcgcaactcaatagctgcctcagaaggaacaaatttccaatttctcaacttgtgcactccccacactcgtcatccagtgtgtgtgtcactccaaaaaagtgaaaggatgtaaagtccggggttttataccctcaggaaaggatttaaagacattacttacctcagactagctcgaaaatctactccgcaacacgcttgcccatcgaatcaacttccgagtgctccaaatctatcaagttcatatttttcacatcaagatatgctagggggtgaaacccaatagaaaaatatcaactttatccacaattcccgaaattagccaaaacccgaccccccagcccacgtcttggaactcggcaaaatttataccaaaacgatcctcatcatctcacgagtatgtacatataaagaacgttgaaatcggagtccaaatgacccctcatatcacccctaaaagatctcttaaactcaagccctagttctccctttttccactgatttttttttccaattaaacactactaattaggtcctagttatggagtccaaaaatcttacctcaatgaagaataaacgttttcctcttcagtaaccctcaaaaagctcggaacccgcacaacaatggtgaaaagaaagctaaaaattgttaagtcccctttttatactttctgccaaggcatttcacacctccggcctttatcatcgcacctgcggtccccacatgcgctctaggggaccgcacttgcggaaattcattaaccagacacttcttgcacctgcgacgcaggtgtcgcacctgcggctcgcagatgcggcccacacaaccgcttctatggatctttctccaagcctcagaacccgcacctgcgacctcttccaccgcttctgcggctcgcacctgcggtcaaatacccgcaggtgcggaaattacagtagcagaaacaccatcagctggaagctgcaatttttcaactccaaaaattcccgttaaccatcgaaatcaatcctgagcccctcgggaacccaaccaaacataccaacacatcataaatgatcattcaaacatagatacactctcagaacacccaaattaacatcaaaacaccagaatcacagcaaattcaagcctatgaactttgaaattcctaaattccaccaacaatgtcgaaaccaaccaaaacacatccgattgacctaaaattttgcacacctatcaaaaatgccattatgaacctgctccaactgttggaattccattctgacctcgatagcttatttttcactgccgatcggaaattaccaaaaactaactttcgccaattcaagcctaagtcccaaatcacctaacgaagctatccgagccataaaatccgcattccgaggttgtttaccaataagtcaactcctagttgacttttccaactataaagctatttttagagactaagtatctcaattctcactacaaccattcgaaacccgagccaaccgactccaacacatcctaaacagtataatcaatgtatgacaaggcaaaaacaataataataatgcagactctacagaacgaccgatcgggtcgttacatagacatgagagaaacatggagtacaacactcaacatgtaagtctgaatacctctgtgaatcatttaatatttaaaatatcgtgcatatgcgtatgaatgccataccatgcataggtatatgtatacataacatcatcaagcctctgagggcatccaatcatatcacctcggccactacgggcaaatcatcaacgtgtaccagctgatcaagtggtggtgcgtatatgatacactctatgttttcgtacgtgaaatgttacatctcgcatttttatacgttaaagtttcgtcgtcagttaatcgacataagtttgggaatgagatttattttgagattataagcattatgctatttcaaagcaagtgatgagtaaattcgtgaaggtgagaggggagcgaaatcgaagaaaatgagttttgtcgaggttcgacaatttggggtaaaatatggtccaggctataatacctcgtatttatgaacttatgccatataaggtaccacatgaccatgatagtaaggtgtataagatatattaaagtgaatagtattttaagtaatttaaaataattattaattatgtgaataattaattaatgagggaaattaacaagttaattaaggattaattaagattttggataaggcctcaagggccccaaacgtggcagcccaccatgcccaagttgtgactcttaagtcacattttaaggtggcaaagatttgagtgtttagtcatcaaagtggggcccacacaaccaagacatttaaattcattctctaattcatttaaagagacgtggatatctctttaacatctctaattcacttcagcaaattcaaaacaagaatttgcatatagcatccttagtaacgtgacttttttgaaaccaaaattcaagcaagatctcttagcatcttaacaattgagatgttgcaaatttaattgaacatggtgtaatctttctcaagaatatcatacggacttttctctaatccgattttgatgtcatgtgtttggtcgcgattgtcgtgtgttagagggattgtcaagacaaccgattcaagtatgttaaggctatcacttctttcttctggcatgatctatacgacacaatcgaaataacaaaatgcacaattttcatacatgactctattcataaaaatactagagatgcttatgttcttaattcaccatgtgtgatattgttctatcatctgttcatgggtctcagatgatacgtacttctcatgcattgcattcatttacattgattatgaccatatggcgttatatatatatatatgcatatatatatatatatatatatatatatatatatatatatatacatatatacatatatatatatatatatatatacatatatatatacatatatacatatatatatatatatatgtatatatatatatgggaaaagattacgacgttatatgtgcaccaccacctgatcagttggtatacgttgatgatttgctcgtagtggcctagatgatatgatgggatgccctcaaggattgatgatgtaatgaacgtatatacccatgcatggtatgacatttatacacatatgcatgacattataatattaaatgattcccaaagctattcagatatacatgttgagtcttttactccatatttttactgaatttcgttacgtacatactcgatacattatttttagtgacttctcttttgcttggggacgttgtgttgcatgcacgcaggtcctgatagacaggttgagagtcctccaagtaggctatcagctcagcggaagatgttggtgcactccatttgctctagagttgtttatttggttagtatgatttagacatgtattgactggtatggcagggcatgtcccggccttatgacgtttatgtactcttagagtcttgtatacatatgtcatgtatatgaaatattgtatggacttgtcggcctatgtataagtcagtatatcaggttaggtcattttatgtcgagtgttctctcatgttttattcttcttacctcatacggctcttgtgagccacttacctatgatgatgtaataataaagatatattatgttggtactcggtcgagtaaggtatcgagtgcccgtcgcggttcatcagtttgggttgtgacagtatttaacgttgtaacctttatatatatatatatatatatatatatatatatatatatatatatatatatatatatatatatatatatatatatatataggttacaacgttatatactgtcacgacccataagcattatgctattccaaacaagtgaccagtaaattcgtgaaggtgagagggtaagcaaatcgaagaaaatgaattttcgtcgaagtttgacattttggggtaaaatacggcctgagctaaaatcccactatttatgaactagtgttatacaaggtaccacatgaccatgatagtaaggtctataaaggtgtgttaaaaatgagtagtattttaagtaattttagataattcttaattatacaaataattgagtaattaataatttttagtgacagataaattaaaatctttggataataaaattttttggatgacttaacccccaaaaatgtggcagccatctaaaagacacttaacaaagagtgaaagatggcacgttttaaggaataaatgtgacacaagtcatgaaaggtgaggccacgccaccaagactaagattcattctccaattaaaaaatgaaggtgtattatatccaaagaaggcttcagcaaggtaacttcatgagcagcgtaagattgcatagtttattcaaccattcaaaacgtaagatttcataggttcttcaacaactcaaaacgtgagattttgaaattataagggagtacagtgcaatctttctcaagaatatcatacggatttttccctacttcgatgcgctgttacatgttttgtcgcaatcgacgtatgtttgaaggattgtcaagagaatcggcttaggtatgttaaggccatccctttttttcctttggcatgatccatacgtcacaaacgaaacaaacaaatgcacaatttccataaatgactctattaatagaaatactagagatgagtatgttcttcatttcccatgtgtcatagtgttatatcatatgctcatgggtcttagaaaatacgtaagttgaaaaagtttatttgatgatattaatcaaatgtataatggtcttctgacagtccgagagattttattgacgtacttctcatgtattacattcatttatacatgtacaatgacccatgaccagatggtgttatatacgtatatatatttatattatatgtatatgggatatgggaaaaggttacgacgttatatacgcaccaccacctgatcagctggtatacattgatgatttgcccatagtggccgaaatgatataacgggtcagatatacccatgcatggtatgacatttatacgcatataaatgacatctatatattaaatgattcacagagctattcagatatacatgttgagtcttttactctttgtttctctcatgtctattgtttacgaattttcattccttacatactcggtacatcatttgtagtgacgtcctccaagtaggctatcagcttagcggaagatgttggtgcgctccatttgctccggagttgcttatttggttagtatgatttagataggtattgattgatatgtcggggccctgtcccggccttatgacgtctatgtactcttagaggattgtagacatatcatgtatatgaaagattgtatggccttgtcggcctatgtttagtatacgagtgattagtttggcctgatatgcccgtacgtcatatgtataagttactatatcaggttaggtcgctttatgtcgagtgttctctcatgttttattctacttacctcatacggctcttttgacccacttacctatgatgatgtaataataaagatacattatgttggtacatggtcgaataaggcaccggttgtccgtcgcggcccatcggtttgctatcataaaggttacgacgttatatactgtcacggcccataagcattatgctatttcaaacaagtgatctgtaaattcgtgaaggtgagagggtaagcaaatcgaagaaaataaattttcgtcgaagtttgacattttggggtaatatacggcccgagctaaaatacccgatatttatggactagtgttatacaaggtaccacatgaccacgatagtaaggtatataaggtgtgttaaaagtgagtagtattttaagcaatttgagataattcttaattatgcgaataattggataattaattatttttagtgggagataaattaaaatctttggataataaaagattttgaatgacttaaccccccaaaaatgtggcagccatctaaatgactcttaacaaagagtgaaaggtggcacactttaaggaattaaagtgacacaagtcatgaaaggcgtggccacaccaccaagactaagattcattctccgattcaaaaatgaaggtgtattatatccaaagaaggcttttgcaaggtaacttcatgagcagcgtaagatttcataggttcttccaccattcaaaacataagattttataggttcttcaacaatttaaaacgtgagattttgtaattataagagaatacagtgcaatctttctcaagaatatcatacagatttttccctacttcgatccgccgttacatgttttgtcgcaatcgacgtatgttggaaggattgtcaagagaatcagtttaggtatgttaaggccatccctttttttcttttggcatgatccatacgacacaaacgaaacgaacaaatgcacaatttccataaatgactctattaatagaaatactagagatgcgtatgttcttgattccccatgtgtcatattattctatcatatgttcttgggtctcagaatatacgtaagctgaaaaagattattccataatattaatcaaaggcataatggtcttctaacagtccgagatattttattgacgtacttctcatgcattgcattcatttatacatctacaatgacccatgacgagatggcgttatatacgtgtatatatttatattatatgtatatgggatatgggaaaaggttatggcgctatatacgcaccaccacctgatcagcttgtatacgttgatgatttgcccacagtggccaagatgatatgatgggtcgcatatacccatgcatggtatgacatttatacgcatataaatgacatcattatattaaatgattcatagagctattcagatatacatgttgagtcttttactccatgtttctctcaggtctattgtttacggattttcagtccttacatactcggtacattatttgtactgacgtcccttttgcctggcgacactgtgtttcatgcctgcaggtccgatagacaagttgagagtcctccaagtaggctatcagcttagcggaagatgttggtgtgctccatttgctctggagttgcttatttggttagtatgatttagataggtattgattgatatgacggggccttgttccggccttatgacgtctatgtactcttagagcattgtagacatatgtcatgtaaatgaaagattgtatggccttgtcggcctatgtccagtgtacgagttattattttggccttatagtcccctacgtcatatgtataagtttgggtcgttttatgtcgagtgttctctcatgttttattctttttatctcatacggcccttctggctcacttacccatgttgatgtaatgagaaagatatgttacgttggttctcggttaagtaagggcaccgggtggccgtcgcgatccatcagtttgggtcgggacaaaagtggtataagagcagttctgtcctagggatctacaagccatgtctagtagagtcttgtttatgggtgtgttgtgcaccacacttataagcaggaggctatcatttaggactgttagtctttattcttactctagatcgtgtggtagagctcagttgtaagaactcaatttcctaaactctatcttatttatgataggacgacgcctacacctagaaagacggttggtaagagattgaatgccattgtggaagagttgagtcagagtaaatccattttgcatcatgcttatgatgagtaaatgtaatgtttcagcagatcgtgtgtgtacaaagacatgtgagcttctggaaaaaggagccctaagaaatgcatatctatccacccatatggtaaaaatcaacgagagaatcataaggtagatacaagttttaacgagtacaagaagcagatggtacagaagggtacagggtatttagctagtgaagattatcatcacttacaactcgggaagagaaatataagcattttgagttaccttcaacagtaacaaaggtatgtataattggccatacccatctcacttatccctatgggggctaacatgtgtagtttaagagaaggacgggaaatcaggaatcttgctcgggttggagtaacccaaaatagtgaatggattttttgtgttagttgacatttttgaaggatattacgaaagtgtaaatagatctccttgtgagatacctagatggtgcactctaaaaatattacagctggatatgagtactacaaagataggcactgaaatcttgcaaggggatctaagagtaaaggaatatcttgtagaagattttagaataaagtgatagacagaaatattagcgggaaataagaagagagttaatgaagcaatatgagtaagatgtgatacatggatgacaacggtagattaaaaagatgacaatattacactgtctatagtcaagcaagggaaaatacaaaaggtgacaggccttaaaacaacaaaagagtataggccatgcagttatatcctcatttgagaaataagttcgcaactctaacgcgattaccaaaaggaaaagttagaccctagagtaatagaattcagcatggactggtgaacaagataaactaaacatgaattagggacggagtgatttgataatggtcggtatcatgagaatttcatatttgtgttccggcgattatagaatggacggaagaagaataacctttaaagtgcattcaggaagactatcacgacccaaatcgaagggtcatgatgggcacctagtgccttactcaatcgagtaataacgtaacatatctttcatatcgactatcattggtaactaggacacatggccacaactcgtaatgtataagtatcagtgggaaacgatgtatcaatgaaccatctttcttaaaacatgagtacatatgggccgtctaggcctctaacgtactgtacaaaatgaacctctatctacaaagactctaagagtatttcacatcaagtgggatagggtaccggcctacccataagtctgtagcaaaattttgacacgatgactcatagactcagttgcactccgaatgagatggagatttaccgatcattcgttgaacgctaacctcatacactatgagggctcatctaactgattgtctatacctgcaagaatgaatgtagcgtccctaacaaaaggacgtcagtacgaataatgtaccgagtatgtaaggcacataaataagtatattaaagacatggaagaaacatggagtaaatgattcaacttgtaagtctggataactctgtaaatcatgaaatacttatagtgtcatgcatatacgtatgaatgtcatgtcatgcatatgtacatatgttcataatgccatctagccgtgggtcaatgtacatgtaaatgaatgcaattcatgaattgcgtcaataaaacctctcagaacgtcataagaccactatgactttgattaatatcataaaataaactttatcgacttacgtatttcctgtgacacatgaacaaaagatgtaacaataagatacatgggaattcaagaacataggcacctctaatacttctatgaatagagtcatttatgaaagttgtgcatttgcttgattcgtttgtatcgtatggatcatgccaaaaggaaagaaaggatactcgtaacatacctgaaccgattctcttgaaaatccctctaacacatatcttttacgaataacacataacagaggatcgaagtagagaaaaatccatataatattcttgagaaagattgcaccatactcccttagaatctcaaatcttacactttaacgtattatgaagtttaaaacaagctaattgagctccatccgttagcatagccttaagatacaacctaaatgatcttcatcggttagcatagccttaagatacaacctaaatgatcttcatccgttagcatagccttaagatacaacctaaatgatgtaatgagattgtctcaaaattgttggtgtttgtgggccccacttagatgactaaactttgtcttaaaggtccctatttgccacctatttttaatgactaagaatcactacttggtctgccacgttgtgggggggggggggggggtgtcaaacttatccaaacttttataatcaattaactaatataccaccaaaaatcattaattacccaactatccatatatttaagaattatcttaaattacttaaaatattactcacttttaatacactttatgtaccctactatcatggtcatgtggtaccttgtatggtactagtccataaatacggagtattataacttggaccatattttaactcaaaaagtcaaatttccaagaaactcattttcttccactcggtcatcctctcaccttcaaaaatttacttatcacttgtttgaaatagcataatacttataattccaaacaatcccattcctgaacttatgtcgattaaattacgatgaaacttaacgtacgaaaatgcgggatataacatctcatttctaagctttcatcaatttattggtgtgcggaaacgtggggtgtaacatcattcccccctttggaacatccatcctcggatgttgactgatacacgtatcattttcgtaacttatgtcttttgaataatttagtacttttcttgccatctaggcgattgttctgtgaataaatgcaaaagacaggcattcccccctttaggccgttttctcacaccacgacttgtgattggaattcttccaatctcgtaacagtatctacctcttgtcatgcagcctgtattactgcttccttgtgagtgtgcctatgtgacttttctttcccttttcctccagtttttagcatatctttatgcctcactttgaaaacatatgcagagcttgacaagatatccctctggtcatctataagtacactgaagttctttgcttggtacttttttgaacttacggatattgctatatcttatttcatagacccgattacccattcatatgactttagtgcatctaggtaggtcatactataccataactctaacttcgatttatcgttgcagaggtctgttaccaaactccaggttacttttgttgcttatcctatatgtgtaaatctaagtcctttaacacttcctcattaatattcatcttaagaatgacagtctaatctcatctcatactttgtaactttaatccattcattattgattcacctcaatattgatctataatctaccactaataacttgaccttttatgtaacattgccgctagggctcacgtctcatcggggaacatctgaaatgattagactaatccacctgaggcgataccatgctttcataatcatatttcatagcatcccaatgtgattcaccttgcgtgtgtattttaatcttgtacaattcatgaaatcctttttgtttcttcaaatcattactcaatcgaaggcccaaatgtcatcctttatttatcacaattacacactcattctactaccacgaaagcattccatatcttctaaatgcttctagtcttagactccttcgagttcattcagactatactgagcttataacatagagaaaccatcagctcttcttgttttcatggtcttaatcctgagaacttatctattttcgttacattctcactcgccttttcttaccttcttgttctaccatacttatcttgcggcctacatgtatctatttatactactcgtaaccttacttcgccttgcttgcaccgtagatcttcttatgttattcaggaacatcaagcgagatatcacatcgcctctaactcttcattattcttttaattagacccctcagtaccgagaaagcatgggcttgaaaatatgcaagtgacgacgtcgctatcacttctggatactgaatcccagctattatccttctatctgaagtatggactattcacaaccttttgcttttgagtatatcatatgttgttcacctttaccttacttaccttaaaatctcgcatcacatcttctatctcgttcaatcctcccttccacataggtataattcacatccacgacatgaaactctattataatacttgcacctctagttcatacacaatcaagtggaagcttcatactgacttcttatgaggttggtactttttctagctggctttatcatagagacgttatagaatatggctagtgtgctatttctcttgtacctaagataaaggtgatcctgcaatgttctgaatcacgatatctataattttctgggtccagtaatcagactcctgatttacttagttaatgtaactctttagtttcctcttccctctgatcaacctttatgtaggcttaagctatctttcaatctgcggctcatggtattagttattactttagcccttcatggacgctatggaatgtccatgacacaatattctaacaattcaatcctttgtctatgacctgggttcaagtctttcttttaacttatactgaaatcttctaccactgtatgattgtcaactaactatggatcattgactgaataattctttcgttccttctcatctttctttatacataagcagttacttttcctggtctttctgcctccttgttgcatgcatacttttctcatcttagttcccatgcatgccgggattttgcgcaattcatatggtctcgaatattaagttttggtttcatttcccgctgattagccacgataggtgccactttcatatggagtgcataaaatgttgttgtgagactattgttacaagaccatttcttctttaggtcattgtgcttaggttgaagccttcatctttatttcctcaggtagtcttttcattgtagtacttaagggccctccaactcttttaaagctgcgagcttattacatcgaatactcaacggaatttttgatgttcttccctgcatataattatccgtagttacttatttccacgcccttgttcttgtaaggtttcttctgaactgatattttgattgtcacaatggcattctcttttatttccgtaatactcatacggtacctttaactatcctaactcctatctgaataattatcaagtatttcaatgtcataactgcgtggttgaattcactatgttgggttttactatgtttatcttgcacgatctgttgatttgtctgtaaccttttgtctatccttgactaggctcttccagaatcaactattaactactcgtctgcccatttttatatcaaataccgcacaatctttcttcagttatttcctttgtcttaacttacatctcgcactagctccttatctgtcaatattatctcagtcaggaactcttacttcctctccctgacgtcgtgtttgcataatgttctggaatcgtagcatatctataagctttgaataagtgcaatcttatccttttctcattgttattgcattcttcctttctcattccatagttactagaaccacttatttctgacttaatgccacatcactctatattcccccttttggggagtactaagatatagtactacaacgatctacctatagatgttttacctcttcgtctttggcgtcttttaacatcattgatgactcttacccgcctaggtaatccttctatactaagaataacaaaattccttactcacgagggtgacacttagtgtaattggaacatatagtcccttaatgataacaacacgataggggtccaaaatttactaaagaaaaatcaaaaaacgtgcagaaactaaaagaaaataaagaaacaaaaaaatacggaaaattaaggatagattgaattcaagaaactctttcttgaattcaagaagtctattcttgaagttgaatcccaacaacaacaattagctaacaataactaatcgcctttggtagagaatcaaaacaagaaatagattgtgaaacccgaccctttagaataacaagaacaacaataagcctaaacttatcacctttcttgaatacctagtagtgatctaagattttgaaaaggttttaatcttaccaccttaagttgagtcttgaaggttgaagaataaatccaagagtagccacacacgagtgcaagaaaaatctcacaacttttattgatattgtctataataatctaagtctaaaaacaaagaatacaccctttatatagagggggtcatgaaattgtatcttaaaaaaaagaaataaagtcctaaactacgttggtcaacaagtccaaccaccttaggaaaaggaaaatactaggaagaaaaaaccaagttattcttggaaagtaattcgaaattttttagtaaaaggaaaacataaccttaactaactgggaaagcaatagatatagtcccagaatatatggaaataagtcccaaaccaatcttggatagaatcttggaaatcttgaaggaaatttgcaagcaacttggcaccaacttgcactcgacatctagcacgactattgtatccttcttggacatcaagtaagtcctttttatgctatgaaaacatggctttatgtaggacttcatgggctgagagtttggacacattttaggcgccaaattggttcaaaagttgactgactaggaccttcttcaaagcatatctcttgggatccaatcctcctcttcttggacataaacttgggccataaaataattataatatctagccaattcatatcctttatccttgagcactttcattccaattaacaacttatttcacttgatatctaatgaccttgtttggcaacactttagcttgacatcttgttaaaggccatctttgggactccaaagcttcattcttatccttgaatagatttgagcttcctaggatgctatcattcccctcttcttgaagaaaatttgtccttgaatttcgaccttgcaagaaaagaaaacatgcgctattagatggcatccactaatctgaaaaaatggtaggaataaaacaagatagtgaccatgtgtctacttaacccaattaagcctaatagatgtaaatactcccttataaagcatatggaaatcatcatcccaataaaatttatgcctacatagatttgtcaaacaaaaacctctctcagatgcactatataatgaaatttgcaatgtgatcttgtcaataaggtagtccaaatatgtgcacgctaaagaaattacaaaatattggtcatgcaaccatttaaaacaattatctctgccttatgtatcaaataagacacttttatgatatagccaattaatcataaatcccatggattcttctacatgtaagttattcaaagaaacacataaattctcataaaggtcagaataacccatagattccaaaataaattttcaatacatccaagctcatgattatatctttccccaataatattcgcaacatcgatgaattttacataatttctcaaattgtcacaaaaagagtcatagataggttcatgaaagagtatttgatcactaatgtcacaataatcacgcatattctctttactagaagcaagcacttttatagcctcgcaatcaacatgactagaggaatgactttccatcgaacaacaaaactcacattctagcagtttatcgcatgaaaactcattaggcacttgaataagagaagaaaacacatttaactcattagcaagccttttctcataaattttatacctttttccaccaagttggaatgcatagtgtaacgacccggccggtcgttctgtagaatcagccccgttattcctgttactgccttgtcatgcatttcttagtttgtttatgatgtattgggttggttggttcgggttcggagtggtcgtggtgagaattgagacacttagtctcttaaattggcctaatagttagaaaagtcaactaggagttgacttattgataaacgaccccggaatgtagattttatggcttggatagcttcgttaggtgatttgggacgtatgagtgttttcagaatgtgattttgaggtccggagtagaattggcttgaattggcgaaaatgagtttttggcaatttccgattggtagtggaaagtaagccatcagggtcggaatggaatttcggaagttgaaataggttcgtatgatcattttggatgtgtatgcaaattttcaggttaatcggacgtgttttggatggtttcagcatctttggcgaaatttggaaaattctaagttcataggcttgaatccgaggcaaaattagtgttttgattctattttgggtgttccaagagtgtgactaagtccaggtgatcatttatgaattgttggtatttttggttggggtcccgaggtgcttgagatgatttcggatagccatcgggggattttaagttggaaaatagcagttgatgctggtttaaccgcacctgcatataggctcccacaattgcgggcctgcagaagcggacaaaaggccacagatgcagatttgggtggacatgaggaaaggccgcagatgcggtgcaaaattttggctttaagtgattttcgcaggtgcacacctcgcaccgcatatgcgggtccgctggtgcgagaaattggccgcaggtgcgggaatccctgggcagaacatataaaaagggtccttagcgaattttggtcattctttcaccattttcttacggggttgaagcttttcaaggattttttaagagggaaatcgagagttctttgtggaggtacggtgtttggacttaaaactcatttatgtgtgattaatggactgattagtggtgaaattggggtgaatcggtgctaaaactgggtaattagggcttgtttttagagactttaaaaatggaatttgaggggtcatttgcactccgattttgatgttcttggtacgtatagactcgtgggtggatgaagatttttgtggtttaaattttatccaattcagagacgtgggcccggggtcgggtttgaccaatttcgggatttttgggtacttttgataaatttcgaataggtttcgttccttggcatgtaataatgatataaatatgatttttggtagatctggagcactcggagaccgagtctagaggaaaaggcattgttgactagtttttagctggttttgaggtaagtaacgttttcaaacttggtcctgagggttcgaaatctcaaactacatgagatatgattgtaattaaggtgacgcacatgccaagtgacgggcgtgcgggcgtacatcgaatgattatggcatgtctcatcccatggcaccgtctaattgctacatattcgtactgtgaaggttgtaattaatgtgaatatgctagaaatcatgtacaaacgctaaggcttcacgtcaaaaaatgctaagacacgaatggtcggttattgttatctcaatttgtgattatttgctttcatgtactcagtcctgttatagcctatcgtttcatgcctcagtctcagtatttgttaattttatacatgttatcatttgatatgggctgatttatacatttgtgagccatatgagtgagactggagagtaatgactgagtgaggccgagagcctattattgagatagatatgagatcggactgcacaccgcagcgatacttggatcatgcctttgttggcttgatatagtgcttgggcttataggagcccctccggagtctttacacccccaatgagagcaatgatattggaggatggatattccatgaacatggatcttgtccgaagttactgatatgtgagggatggatcgtccctggacatgtattttgtccgagtgatgtgttccagagatggatcttctccacggggttggattggcctttttcctcagtattgaatgactacgatcacctgtgtttatgtataatccgggatggactttcccagggcctgagagccatctacaatactgggtggacttctgtgtgagagttacgagcactgtgtgcattcccattctgatttctcgtacttatatactggcatgtagattatacaaggcatacttggtatattttgtttattctcttataaattgttatcatgcctaattttttacgttgtttactataatttcaaaggtttagtccgtcattacctctcagcccataggttgggttcattacttactgagttggtgtactcacgctaccccctgcacgttgtgtgcagatgcaggtacttcgggacccgacagtgcatactgagcagccgtcagagtttcatcggagttgtcgaggtagcatctggcgatcatgacctcatcttctccttcttattcttcctgttgcactttgtttgagactatgttttctatttctccatttcaacctttttatgtaatattagctcgtgactttgtgacactagatccggggttgggatttttttcaattgatttaatgatgttagatctttatatggatttctattgatacttttgcttctgaatttataaatttttcctgaaaaatatacttggttcaatgaaatggtggcttgcctgattccacggcaggcgccatcacgactaagaaattgggtcgtgacaagttggtattagaactctagattaaataggtctcaccagtcatgagcaggtttagtagagtcttgcagatcggtactgagacgtctgtacttatgttcgagaggctacataacccttaacaaaatctcacattattgaattttgtcgtgcgactctattaaattatggaactaaacttttgttgttttcattctctcacagatggcaaggactcatgctaccgatcgaggtgatcagacaccagctggaccagcgagagggtgaggtcgtggaaaagggaggggtgcagctcgcacagcagtcggggttgtactgctggtcacccccactgctcaggatcaggtcctcgtagttgagattccagcgggacaggatcagactcaggcaccaccagtgcctattatgattccgggtcatcaagagaccctaactcatattttgacggtgtgtactagcctggcacaggtcgtcgctatgcctactactgctgctacttctcaggccgggggaggcactcagactccagtttcccggacacttgagcatgttactcaagggcttcagacaccgggggcagcaacagctcaggattttgtagccccagctttggcagatgatgagcagcgcatattggagaggttcaatagacttcagcctccgactttcagtggtactgagggcgaggatgccaaggccttcttggacaagtgttagaggattcttcgcacagcagggatattagaggctagtggggtccctttactaccttccagttctcaggagctgcacttgcttggtgggaggcctatgagaggcgtagacctattgatgcagcgccacttacatggcatcagttctccattctcttcgtagagaagtatatactgtagtctggcagggaggagctgcgtagagagttgagcaactgcgtcagggggtcatgaccgtgacgcagtatgagatgaggttctccgagttggcccgtcatgctatttggctagtccctacagaaagggagaggatcatgaggtttgtggatggcctcacttatcagcttcggatgtttctgaccagggagagggtatatggcgcatcttttgaagaggtagttgacattgccagagagattgagtcggttctccaccaggagcgagtcgagagggaggctaagaggccccgaggattgggtagttttggtggtattcattcaggaggtcagtctcagaaacagcaaaggccgtttatttaggcctccacagccagcccgcctagcctacagtggtgcttcatcaaggcacggtccccgtagctctcatctgggtcatttatcattcagctttcttccagcccagagttcatctaggccaccaacagttcagggttcttcagcacatggcctttctagtggttattctggttctaggggttcccttcagtccacactgtcatttgctgagaggggttgctttgagtgtggtgatctgggtcatataaagaggtttattcccggtctatcgtgaggttcattccagcagaggagccagcctcctgcttcagcaccagctactacaccacccgcccaggcagctaggggtgggggtcagtcagaggccgccctagagggggaggtcgagtaggtggaggtcaggatcgtttctatgcactcccacccaaaccatcctatggcctcagatgcagtgattacaggtattatcttagtctgtcaccgagatgcttcagtcttatttgatcctggttccatgtattcctatgtttcatcatactttgctcatttcttggatatgccccgtgagtccttagttacatatgttcatgtgtcgactccggtgggcgatactattgtggtggaccatgtgtatgggtcttgtgttaaatctattggggagctggagacccaggcggatctattatttcttagcatggttgacttcgatgtgatattgggcctggattggctatctacgtgccatgttgttcttgattgtcaggctaagaccgtggccttagctatgctcggttgccgaagattgagtagagaggttcggtggagtatgtgcctagtagggtgatctcctacctgaaggcccagcgtatggtagaaaagggatgtttatcgtatttggcttttgtgagggatgtcggtggtgagactcctgctattgactttgttcctatggtccgtgattttctagacgtgtttcctgcagacctgccaggcatgccacctgacaaggacattgattttagtattgatctggtgccaggcactcaacctatttctactccaccttgtcatatggcaccagtggagttgaaagaattgaatgagcaacttcaacaactcctagataaggggttcattcatcctagtgtgtcaccgtggggtgcaccagtgttatttgtaaagaaaaagggtggttccatgagaatgtgtattgattacaggcagttgaacaaggttatagtcaagaataaatatcctttgcctcgtattgatgatttgtttgaccagcttcagggagccagagtgttctctaagattgacttgtgatccgggtatcatcagttgaagattcgggattctgacatccagaagactgccttcaggactagatatggtcactatgagtttcttgttatgtcattcgggctgaccaatgccctagcagcctttatgcacttgatgcacagtgtgttccggccttatcttgattccttcatcatcgtgttcattgacgacatattggtgtattcccgatctcgggaggattatgagcaacatttgagggttgttctccagactttaagagagaataagatgtatgcaaaatttttgaagtgtgaattctggcttgattcagtggcattcttaggccacatggtgtcttgtgatgggatcaaggtagatctgaagaaggtggagacggtgcagagttggcctagaccatcatgctatcgagattcgcagcttccttggtttggtagggtactatcgccgctttgtacaaggattttcatctattgcagaacctatgaccagactgacctagaagggtgctccattcagatggactgaggagtgtgaggagagctttcagaagctcaaggcatctttggctacagctctggtgttggttttgcctacgggttcaggttcttacacagtttattgtgatgcctcgagagttgtcctgggagcagtgttgatgcaggacggtagggtgatttcctacgcgtccagacagttgaaggtgaatgagaagaattatccagtgcatgatctttagctagcagcaattgtccatgccttgaagatttggcgtcattatttgtatggggtgcattgtgggattttcactgaccaccggagtttgcagtatctgcttaagcaaaaggatttgaatttgcatcagaggagatggttggagcttctcaaggattatgacctcattattctatatcatccggggaaggccaatgtagtggtcgatgccctgagattttggggagtctagcctaccttccactagcagagcgacctttagcacatgattttcaggctttagcgggtcagttggtgagattggatttatcagagcccccacgagtattggcttttgtagcctccaggtcttctctttatgatcagattagagcacgccagtatgatgacccacacttaactcgttcttcaagacagggtccggtgaggtgatgttagagatctggtaattggttatgatggggtcatgaggatgcagggccgtatttgcgtgcccaatgtggatgggcttcgggagttgattttagtagaggctcatagctcgtggtattccatccatccgggtgccacgaagatgtgtcgggatctgagacagcattattggtggaggcggatgaagagggatactgttgagtttgtggctcggtgtctcaactgtcagcaggttaagtatgagcaccagagaccatgtggattgcaccagaggttagatattccggagtggaagtggaaacagatcaccatggacttcgtagttggtctcccatagacttcgaggaggtttgattctatatgggttattgtggatcggctgaccaagtccgcgcacttcattcctgttggcactacttattcttcggagcggttagctgagatttatatcagggagattgtccgactgcatgaggttcccgtttctatcatttccgacaaaggtactcagttcacatctccgttttggagagccgtgcggggagagttgggtacccaggttgagttgagcacagcgtttcatcctcagacagacgggcagtcagagcgtactattctgattttggaggacatgttgcgtgatattgttatattttgggggttcatgggactaatttcttccactcgcggagtttgcatataataatatttatcagtctagtatccagatggccccgtgaggctttatatggtaggatgtatagatctccggttgattgatttgagtcgggcgaggctaggctattgggcacagacttggtccaggatgcgttggatactgtgaagttcattcagcagtggcttcccacggcgcagtctaggcagaagagttatgtggaccagaaggtccgggatgagtcttttatggagggagagaaggtattgctgaaggtttttttgatttccattggagattaggaatagatggactttctataggacccattttattaacaggatttatcactactttagctactttagcggcttggccagttactcgagattctcgattattccattttctcatgttagcaatgtatagtggtcaaattggatcattttcgtctcgggaccttttactttttttcatcatgtgggagttagaattaattcctgtttatctacttctatgcatgtggggaggaaagaaacgtttgtactcagctacaaaatttattttgtacacggcggggggttctgtttttctcttaatgggagttttgggtggtgtcacccatgaagggtgttatgaggttcaggaagaggggcaagctgagtccccggttcattgggccttttgaggtgcttcataggattggagaggtggcttataggcttgctttaccgcccaacttattgagtgttcatccggtgttcccacgtttcgatgcttcggaagtatgttggtgacctgtcgcatattctagacttcagcacaattccgcttgagggtggtatgtcctacgaggtagagctaatggctgttttgagtcgtcaggtcaggaggttgagatctagagatatagctttagtgaaggttcagtggtgataacaattaggttgtgaatccaaactagagtaagaattttgagaagtaaatgcggaagcagtaacaataaggaattaaacgactagaattaaagtgcataaaatataggatacggaaaaattcaaggaaaaaattccaagaacttccaagaacacaaagttctatagccttgacaagatccaagcaacaacgttttgatttatagaagaaatcaaacacctttactgaagaacaaatcaaaaacaatagattcggatcttgaccgctttacgagtaacttgagacaacaattaataactagtattaattgccttctaagaataccacaaagaaatcaatgatatcacaataaagaagttatcttaatatcttgaactatgaactagtaaaggttgaaagataaatctcaaagcataagcacaaaggttcgaaagaactcccaaagtataatatttattaatcaataatcaagtaccacaattaatgaaaagaactcctatttatagaagtaaaaagtccttaaaactaggtagggtggttgccaagtcaaaccctaacttggaaggtgctaaatactagaaaacctaataaaaactagtaaaaataagggggtgggcagccaaacctctttgggggcaaatttgggcccttaaactactagtttgggccattgggttagacgccaattgggatacttttgaaacacccccttttggacctcttttaagctcattttaagctcttctaggtgtccttttggtggacttcaagggatgatgttgggacccaatcttcctcttcttggacttaaatttgggccaccaaataattgtaaaacttggacaattcatctcctttgggcttgagatcttcctctataattaaaagcttctttatttcccattgaagtccagtaaccttagtctgcaattatttagcttgagatcttgtaaatggctttcttggagcttccaaacctgtatccttgtccttgatgctatcaagtggagaggtcagcctgtggaggaggccactagggagactgagcgggagatgcagagaagatatcctcacttatttgagacttcaggtatgtttctagacccgttcgaggacgaacatttatttaagagggggagaatgtaacgactcggtcggtcgttctgtagaattagcccctttattcctatttctgccttgtcatgcatttcttagtttggttatgacgtgttggggccggttggttcgggttcggagtggtcgtggtgagaattgagacacttagtctcttaaattggcctaatagttggaaaagtcaactgggagttgacttattagtaaacgacctcggaatgtagattttatagctcaaatagcttcgttaggtgatttgggactaaggagtgtgttcggaatgcgattctgaggtccgtcgtagaattaggcttgaattggcgaaaatgagtttttggcgattttcgattggcagtggaaagtaggtcatcggggtcggaatggaattctggaagttggaacaggtttgtagggtcattttggatgtgtgtgcaaattttcaggttaatcagatgtgttttggatggtttcgacatctttggaaaaatttggaaaattctaagttcattggcttgaatccgaggcgaatttagtgttttgatgttattttgggtgttccgagagtgtgactaagtccgagtgatcatttatgacttgttggtatttttggttggggtccgaggggaacggggtgatttcggatagccatcgggggattttaagttggaaaatagcagctgatgctggtgtaaccgaacctgcagataagggaccgcaggtgcaggcctgcagaagtggaaaataggccgtaaatgcggatttgggtggacaggaggaaaggccacagatgcggggctggggccgcacttgcggagtcgcaggtgcggaagttccatcgcaggtgcaaaattttggctttaagtgatttttcgcaggcgggcacctgggaccacaggtgcggtttgcaggtgcgataaattggccgcaggtgcaggaatccctaggcataacatattaaaaggctccttagcgaattttggtcattctttcaccattttcttacgggtttgaagcttttaaagggttttggaagagggaaatcgagagttcttcgtggaggtaaggcttttggacttaaaactcgtttatgtgtgattaatggactgattagtggtgacaattgggggaaatcaaggctaaaattgggtaattagggcttgttttcagagactttaaaatgggaatttgaggggtcatttgaactccgattttgatgttcttggtatgtatagactcgtgggtggatgagggttcttttggtgtatattttatcgaattccgagatgtgggcccgggggtcaggtttgacaaattttgggatttttgggtaattgtgataaatttcgaatgtgtttcgttccttggcatgtaataatgatataaatctgatttttggtagatttggagcactcggaggctgagtctagaggcaaaggcactgtggactagtatttagccggttttgaggtaagtaacgtttccaaacttggtcctaagggttctaaaccccaaactacatgatatatgattgtaattaaggtaacgcacatgccaagtgacgggcatgagagcgtacaccgaatgattgtggcctggctcatcccatggcaccgtctaattgctattacaggttgatattcgtactatgaaggttgtaattaatttgaatatgctagaaatcatgtcatgtaaaaatgctaaggcttcacgtcaaaaagttctaagacccgagtggtcagttgttgctgtctcaatttgttattattttctttcatgtactcagtcctgttatagccttacgtttcatgtctctgtctcactatttgttaattttatacatgttatcattgattcaggctgatttatacatttgtgagccatatgagtgagactggagagtaatgactacgtgaggccgagagcctattattgagattgttatgagatcggactgcacaccgcagcgatactcggatcatgcccttgttggcttgatatagcgcttggtcttacaggagcccctccggagtctatacacccccagtgagcacactgatattgagagatggatcttattcgaagttaccgatatgtgagggacgatgattttgtttgagtgatgtgttctggagatggatcttctccgcgggattggattggcctttttcctaagtactgagtgactacggtcacctgtgtttatgtataatccgggatggactttacctaggctctatagtattgagtggacttctgtgtgagagttacgagcactttgtgcattcccattctgatttctcatacttatatactgcttgtagattatacagggcagacttggtatatttttttcattctcttataaactgttatcatgcctaattttgaacgttgtttactataatttcggaggtttagtccgtcactacctctcagcctatagggtgggttcgttacttactgagttggtgtactcacgttaccccttgcaccttgtgtgcatatccaggtactttgggactcggcaataggtactgagcagccgtcagagtttcatcagagttgtcgaggtagcagctggcgatcgtaacctcgtcttctccttcttattcttcctgttgcactttgtaagagactatgttgtctatttatccatttcaacctttttatgtaatattaactcgtgacttggtgacactagatccggggttgggatttttaattgttttaacgatgttagatctttatatggatttctattgatatttttgcttcagaatttataattttttcctgaaaaatatacttggtttcaatgaaatgggtggcttgcctgattccacgacaggctccatcatgactaagaaattgggtcgtgatacatatgtcatactcaatttcaaaagtaagaaaaatactcttgcacttgaacttagatattacagttaatgactggcttgatatgaaccaaaataccatcatatataaaaattataaagtcaccaacataagaagtaagagtatagttctttacctccaaaaataccttaggtgttccatacatactatacatggacttatttattaatggaacaacttcaccttttattcttttatgtaatgactctaacttagaaatgcctttagggaactccatgttgtaaatctgtaaataaggatcaaaatagtcaaaaggttcaacaacaaagaaattaacaaggcttttatcttccaccatccaacaagaattgatttcgctaaattcatgttggaatacaattagatcctttgcaaacatctcttgtgcctcacctcccatctcaaaaggtctttccacatatggctgcacaaaatcacaagaagtaaaacaagaaagagttaatgggttaggaagtaaaaaaacttttttctttattacactctctttggcttttaccacaagactaacgttttcgtcacccttagcctcttttctctcactaatgtttttttctttttgtttactcaaaccctcttgtttttctctctctacctcacagacttttttaatctcattgctttctctcttttcttttttctcaagatcactctttaccttactggacatcccactctcttcactcaacacaacctctcttttttcctctcttgggatgtcaacatacactcccttactcctctcattcttttctctctcatatttttccatattgtctttaacagtcttttcatcttcaaaaatttgtgagggagtcaaaggtccaagaatgagtttcttcccgttaacctcaaaagagtatctattttttccatgttatatgaagctcttctgtagacatgccatggctttcccaacaagatatgataattcttcatgggaatcacatcacaccagatcgcatcctcataccttctaatagagattagtaatcacactcttttatctacctttacccctctcaacatgtagggttcaatatgctcaaacacaaggcaagttcaatttctcaaccatataagttctatttaagttatagccaaactccttgtcaattctaaggcacaatcgcagacaacactttagctcttgtttgaaaaataattttaccattgtcttccttccatttggtatactgtaagttcgccttttcaagttgttgagtcataactcgcctcctttcactataactacctatttgagacatcttgaagaatgattagaagaattacgtatctctcaaatttggccttttccttctaataccctctcacctctcttgcatttttccactcaaagcaagtcttggttgttaatcttagatttattaataaacctaacaagtcacaaccggcactgataagaataaggagttagaagaaggaaaggaaagtgggagaccaaacctagaaggaataggaattggttagtgttaaaacaaaaaagaaagaatttaaaaaacccaaaagccacaagaataaggaaagaactagcatcccctcttcttgtttcctttcttgacttggaaaccaaataatacttgaattctgaaaataataatgagcaataacccttttttttggctaattttcgttttatttttttatttttttgattatttttttttgattatttttttttgctcaagaacctcccaagattataaagattgaaatcttgattagtctatgatctaataccacttgataacaatgcgataggggtccaagaattactaaagaaaaatcaagaaacgtgcggaaactaaaagaaaataaagaaacaaaaaaatacagaaaattaaagatagattgaattcaagaaagagtttcttgaattcaagaagtctattcttgaagttgaattctaataacatcaattagctaacaaagaactaatcgcctttggtagagaattaaaacaagaaatagattgtgaaactcgaccctttagaataacaagaacaaaaataagcctaaacttatcacctttcttgaatacctagaagtaatcttacaccatggatctgcacacgaaaacatgtgcagtaaagggcatgagtacacgacaattggtacccagtaagtgccaagcctaacccaggtcaagtagtgacgaggtctgattaaggctctactggattttataagtaaaacaatttaaaatagtatagaaggatagaatttctaagctaagcagtaaaaatgaataatctgaaaataaaacagcaacagggaacccttgctcaacacaatgtagcacacatcggaatctcccagaatacgtcccgtagttccaaatataaagatgtagtacagggggaaagctcccggaatacgtctgtagtcccaatttaaatatccagtacagagggaaagctcccgcaatacatccgtagtcccactttaaatatgcagtacatggggaaagctcccggaatacgtatgtagtcccaatttaaacatgcaatgcgagttgatgccggataaggtgtatttaaacagttcaggaaaaagtcacagacaagaacaagatatagactaactaacatggtgcacattgtatcaaatagggaatttaggtaaaacaggtaggcatgcttcttcctgatctaaaatacataagtagcacattaaacagtgaaataagagtaaaatgatttatggaatggataggaaaaatggaatgtttgcaacaatgtcttgtgcacgtactcgtcacctcacgtacacggagcccatacaacaaatagtatcaaaacaacctaaggggaagttcccaacacagagttaggcaaccacttacctcaattgctctactcaactcaacaccacgctcttgccaagattacccgactctgaatggcccaaatctattcaattcaattgcataatgtaaatatcactttaagaaatcgttatagctaattagttcgaagctaaaacgctaaattaggaaaatttcccaaaaagtccctcggacccacgtctcggaatcgggtaaaaattacaaatttcgaacacccattcacttatgagtctaaccctacaagaattactcgaatcggatacaaaaatctcgatcaaaactcaaaaacttggcctaagaactttatccaatttttttccaattttccaccataaattagaaattaaaggatagatttaagtgtataatcatggaatttagtctaaaccgagtaggaatcacttacccaaattgcctaggtgaaaactcttcaaaagtcgcactttcccgagctcccaagttcaaaatatgaataatggttcaaaccctcgatttgggtcttttaagaatctgcccaggtcacgttcactgcaatcgaggaccaccagtcccgatcgcgaagggtaacaaacacgcgcctaaattttcctctacgcgaacgcaacgataagatggcgaacgcattcctcaacatactcagacctaagaaatcacggttggcttcacgcgaccgcgtagaagtacgctaaaacacctgccgccttatttcttctacgcgaacgcaacaaggcccacgcgaacgcattggccaaggctgcccaacctatgcgatcgtgttcctctttatgtgatcacgatgaaaaaaatcctgctttcctccatttactctacgcaatcgcggactctctcacgctatggcgatgaaggaaaaattgttgcaattccaccagcaatcacataaggctaaaaatacccgtttgagcatctgaaacacaactgaggcccccgggacctcaaccaaacttaccaaccagtcctaatacctcattcgaacttggtagagcctctaaaacacatcacataacaccaaaatcaataattatacatggattcaagcctaagaacttataaaattttccaaaatccacaaccgatgcgtaaacatgtcaaaactagtccgaatgacctcaaattttacacacatgtgataaatgacactacggacctacatccactatctgaattccatttcgggcctgatatcaaaatttcacctatcggccgaaatcgaaaaaattctaactttcgccaattcaagcctaaatctactacagacctcgaaaacatattctagacacgctcctaacccctaaataacccaacggagctaacggagtcaatggaattccattgcggatccgtcttcacacagtttcacccataatccgatttctaaagcttaaactcacatatagggactatgtgtccaaaaactctccgaaattcacaactaaacgttgcgacaagtcccaaatgcagtaatagacatggggaaacagttattagggaattggggtgctaactctcaaaacgaccgaccgggtcattacattctccccatcttaagaaaatcgttcatcctcgaaagagtatggagacatacctgaagcggtgaaatgatgagtgtactgactgcgcatatcctgctcggtctcccaagtcgcctcctcaaccggctgacccctctactgaaccttgactgatgcaatattctttgacctgagctttctgacctgcctatctaatatagctactcgctcctcaacatagattcttgtccaactggactgagctgaaatccaaaacatgggtcgagaccgtgatacttccggagcatagagacgtggaataccgggtgaactcctgctaggttggaaggcaaggctagctcataagcaacctccccaacacacgcaacacctcaaaagggccaaaaaatctcggactcaacttacccttcttcccgaacctcatgacacccttcttaggcgatacccgaagcaaaacccgattaccagccataaatgccaaatcacgaaccttccggtccgcataactcttctgcttggactgagctgtgcaaagtctctcctgaatcaccttcaccttgtccagggcatcctggaccaaatctatacccaacaatcgggactcgcccaatcatctcactagagaccggcatcatctaccatacaaagcctcatatgatgccatctgaatgctagactggtaactattattataagaaaactctgcaagtggcaagtatcggtcccatgaccctccaaaacccatcacacaggcaccgagcatatcctcaagaatctgagtcgtgcggtcggactgcccatccgtctgagggtgaaaagttgtactcaactctaccctggtgcctagttcctgctgaacggctctccagaaccttgaagtgaactgtgtacctctgtctgaaatgatagatactggaataccgtggaggcgaacaatctccctgatataaatctcatccaacctctcgaaggaatatgtagtcaacaccgggatgaaatgggctgacttggtcagccaatccacaatcacccaaataacatcgaactttttcaaagtccaaggaagtctaacaacaatgtccatggtgatctgctcccacttccactctggaagctcaatctgctgaagtaaccctcatggcctctgatgctcatatttgacttgttgatagttgagacacttggccacaaactccaccatatcctttttcatccttctccaccagtagagttgtctcagatcctggtacatcttcgcggtacctggatgaatggaataccgcgatctataggcctcctcaagaatcaactccctaaacccatacacattgggcaaacaggtccgaccttgcatcctcatcacaccgtcatctcccatagtcacatccctggcatcacctcgctgaaccttgtcctgaagaaccataaggtggggatcatcatactagaactctcgaatgcggtcataaagagaagaccgagcaaccacacaagctaaaacccggcaaggctccgaaaaattcaatctcacgaactaactgtctaaggactgaacatccaaggctaagggcctctcaactgccggaagatatgccaaactccccaaactctacgcccggcgaattaaggcatcggccaccacattggccttccccgagtggtgtaatatagtgatgtcataatccttgagtaactccaatctcctacgctggcgcaaattgagatccttctgcttgaacaagtgctgcaatcttcggtgatccgtgaaaatctcacagggaacaccgaataaataatgatgccatatcttcagggtgttaacaattgctgccaactcgaggtcatgaaatggatagttcttctcatgcaccttcaactgtctgaacgcgtaggcaattaccctaccgtcctgcatcaatactgctccaaggccaatcctcgaggcatcagaatagactgtataggaccctgaacccgtaggcaataccaacaccggagttgtagtcagggttgtcttgagttgtcacaacccgaaattcccaccatcgggaccgtgatggcgtctaacgttgtaccggctagacaagccaacgtaattgctcaaatttattaaaaacctttattgttaaataagaacaagtgaaatacgacttttccataaacaaaagataataatgagaacggataaaataattacataactaaatccacaaactttttacgaattgtcaaaataaccaacccagatctttggagttacaatgtcacggactatctaagattaatgcataaaaaggtctgaaagaaataatacagatgttttgaaatactaaaaatagaaatgaagaagtagaaggggacgccaaggcctgcggacgcctgcaggactaccttagtgtctccgtgtggactgaaggaagccgcctagctcaatgtccactggctcctgtaccgggatttgcacaacaaaaattgtgcaggtgtagtattagtacaaccgaccccatgtactgagtaagtgccaagcctaacctcggtgaagtagtgacagggctaggacacgacaaataatatcacatgtgcaatctaataatataataaacaaataatgaccggaagtgaacaattaagtaaaaaaaatgagggaaaacatgctggggaaaagggatagcagataacaagtataacttaataaagcaacaatttaaatatcaaagtaacaacaggaaatagcaactcagagaaaataagtgcacgacatcacccttcgtgcttttactctcatcctcaccaaaacaagtgcacgacatcacccttcatgcttttactctcatcctcaccaaaacaagtgcaagacatcaccctttgtgattttactctcatcctaaccaaaataatgaataaatagaaacggcacgacattatccttcgtgcttttaatatcatatcatggcacggcatcacccttcgtgcttttacactctcatcctcacaataaataaatacacggcatcacacttcgtgcttttacactcttcctcacccaaacaatatcacaacagcagtttggcaagaaagaaatcaacagcatgaaccataacaataaataataacatcccggcaagggaacaacaacagaaataacaccgtcccggcaagggacacaactataaccaatctcactcaagtacataactttacgaaatatttctcaaccgaaacaaaggttcaaaagtactcacaaccaagaatttccatcaaatcaaccaccaccaaagtgacatttaatccaaagtgcagtaaatatcaatggaaatcacaaaattcataatatccgactcacgggcatgcttgataacaacatataggtactcgtcacctcacctatacgttgaacatggaataaacacatagaaaatacgactcaacacctattccctcaagctaaggttaggccaaacacttacctcgacctccgcgatcaaaacctagcctcaagcaccgctttccctttcaaactcgctagacataatagactcaataacatcaataaatgctaaacttttcaattccaatgcttaattgtagactttctagcattcttcccaaaaatccaaaaatcgaccccgggcccgcttggtcaaaacacgaggttcggaccaaaacccaatcacccattcacccacgagcccgaatatataatttgttttgaaatccgtccccaaaacaaggtcaaattcccaataaataaaaaagccctaactctacccaaatccctaattttctacccttaatctcatgttttaggcctaatgggtgttgataaaaatggaagtaaatgagtctaagatcacttacctatgaagttatggtgaagaatttcttccaagaatcgcccaaagtggtgtgaagaagaaggagttgtgaaaattggttttactcccgtaagtgtattatctttttttgactgaaaatataactgggtgaaaatgctcttcacgttcgcggacccctggctgcattcgcgaagagttgacttatcagacctatgtgttcgcaaacgtggggccgtgtatgtacagggttaaagatacccagcccccaggtcccctttaaagttatgcgttcgcgaccacctaggtgcgttcgcatagtttccccttttctatcttccgcgatcgggactaagggaccgcgttcgcactgagtaactagctacccagccccagcctctcaccaaacctatgtgatcgcgacagaaggggtgcgttcacgtagagcaaggaccttaaagctctgcgttcgcacccagctctttgcgttcgcgtagagcaaacccagcccccatcccagcctgtgctatgcgatcgcggaggaccttatgcgatcgcatagtacattataccagacactagcaaccagttttacactagtttataagttcaaaaacaccccgacgcctatccaaaacacacttgagccctcgaggctccaaaccaaatatgcacacaacctcaaaacatcctacggacttattcgtgtaatcaaatcaccaaaatattagcataaacaatgaattaaaccccaaaatcagtgaaaatttcaaaaaacttctaaaacatcaaactttgcattcatggtccgaatcacgtcaaatgacttccgtttcttaccaaacctcacagatatgacataaatattatatagaacatgtaccgggctccagaaccaagatacgggcccgataacatagatttgacatacaaattcattttcaaaaacctcttatattttcagaaaatattttcttttaaaaattcatttctcgggcttggggccttggaattagattccgggcatacgtccatgtcccatattttcttacggaccctccgggaccgtcaaatcacgggtccgggtccgtttaccaaaaatgctgaccaaagtcaactcaatacaattttcaacacaaaattatctttttcctaagtttgtcgcataacgacttcccggcgacacgcccgggctgtgcacgtaaatcgaggtgagatagaagggggttctcatgacctcggaacaaagaattatctagaaatacacgagatgaccttttgggtcatcaaaatctccacctctaaaataaatgttcgtcctcgaacggaaatagaaaggtacctgaatcgaggaaaatgtggggatatatgctctgcatattggactcggactctcaggttgctgcctcaacaggctggcctctccactgaacacggaccgaaggataactcttcgatctcaactgacgaacctgtcgaggtaatatggctactggctcctcctcataagtcaaatccttgtccaacgggacactgctgaagtctagtacacgagagggatcggcaagatacttccggagcatagatatatgaaacaccggatgcacgactgataaactcggtggcaaagcaagtctgtaggccacctctcctaccttctcaagaatctcaaagggaccaatgtacctagggctcaacttgcccttctttccgaacctcatgacgcccttcatgggcgatacccgaagcaatacccggtctcctgccatgaatgccaaatcacgaattctacggtctacataactcttgtgcctggattgagctgtacggagtctatactgaatgatcttcaccttatccaaggcatcctgaactaactctgaacccaacaacctagcctcccccggctcgaaccacccaactagcgaccgacactgcctaccatacaacgcctcataaggagccatctgaatgctcgcctgatagctgttgttgtaggcaaactcagctaagggccaaaattggtcccatgaacctccaaagtccatgacacatgctcgcaacatatccatcaagatctaaatagtgcgctcagactctccaaaaatgggcacaccatgcaggagaacaatctccctgatgtagatcttggccaacctctccgaaaaatacgaaaccgatacctgaatgaagtgtactgacttggtcaatgacccacaccgcatcaaacatcctctgagtctgtgggagtccaactacgaaatgcatggtgatacgctcccacttccactcgggaatctcaatttgctgcatcaaagcatcgggtctctggtgctcatacttaacctgctgacagttcaagcaccgtgctacatatgccacaatatcattcttcatcctccgccaccaataatgtttccgcaaatcctggtacatctttgcggcacctggatgaatggaataccgggaactatgggcctcttgcaatatcaacccacgaagtccatcaacatcaggtacacaaatacggccctgcatcctcaagactccatcatcatcaactgtaaccttcttggcacctccgtgccggaccgtatccctaaggacacataaatgatgatcatcatactgccggtctcgaatacgatcaaacaacgaagaacgggccacagtataagccaaaaacactagcaatctcataaacatccaatcttatgaaccgatcggccatatcctgaacatctaaagcaagcggtcgctccccgaccggaatataagcaagactgcccatgctgactgacttccggctcaaagcatcggccaccacattggccttccccggatgatataggatggtaatgtcatagtctttcaacagctccaaccatcttctcagcctcatattcaactctttctgcttgaacatatataccaaactcttatgatctatgaacacctcacatgacacaccatacagataatgcctccaaatcttcagtgcatggacaatggctgctaaccctaaatcattaaccagatagttcttctcatgaaccttcaactcacgtaaagcataagctataaccttgccatcctgcatcaacactacaccaagtccaacccgtgaagcatcacaatacacggtatatagccctgaacctgtgggcaaactaacactggtgccgtggtcaaggttgtcttgagcttctgaaatctcgcctcacactcatctgacacctgaattgggcacctttctgagtcaacttggtcatcgaggctgcaatagatgaaaagccctccacaaaccaacgatagtaacctgctaagccaagaaactccgaatctccgtagctgaggtgggtctaggtcaatctctgactgctgaaatcttcatgggatccacctgaataccctctgccgacaccacatgacccagaaatgcaaccgaactcaaccagaactcagactttgaaaatttggcatacaactgattgtccctcagagtctggagaacgacttgaaggtgctgctcatgctcctctcggctgcaggagtaaatcaaaatatcatcaatgaagacaataacaaacaaatccaaatagggcctgaacactcggttcatcaaatccataaaagcagctggggcatttgtcaacccaaatgacatcaccaagaactcataatgcccataccgagtgcgaaaggctgtcttagggatatcagacgccctaatccccaactgatggtaaccagatcgcaagtcaatcttggaaaacactttggcaccctgaagctgatcgaacaaatcatcaatcctcggcaaaggatacttattcttgatagtaaccttgttcaattgccgatagtcattacacattctcattgttccatctttcttcttaacaaacaacactggcataccacaaggagaaacactaggcctaataaagccattagctagcaaatcttgtaactgatccttcaacttctttaactttgtcggggccatacgatatggcggggtagaaaaaggctgagtgcccggagccaaatcaatgcaaaattcaatatccttgtcgggtggaatacccggcaagtcagcagggaatatctctggaaactcacgaacaatgggcacagactccatagggggaacctcggcactagaatcacgaacataagccaaataggccaagcatcccttctcgaccatacgtcgagccttcatatacgagataacactgccagaagaatgactaggattccccctccactccaatcggggtgctccaggtaaagccaatgtcacagtcttcgcatggcaatccagaatagcatgatagggagataaccaatcaatccccaaaatgacattgaaatcaaccatatcaagaagtaaaagatcaacacggatctcaagaccaccaataaccactatacaatacccgtagactcgatctaccacaatataatcacccaccggtgtagacacatatacaggagtacttagggaatcacggggcataatcagataaggagcaaaatatgaggaaacgtaggaaaatgtggaccccagatcaaacaacaccgaagcatctctgctgaaaactgaaaccatacctgtaatgactgcatcggaggcctcagcctcaggcctagcaggaatagcatatcatcggggctgagccccaccaatccaaaaatccctgggtcgacctactgcgggctgacctctacccctcatagcctatcctccacctctaactgtctggcctccacctctgaaacctcgacatccacccctagctggctgagggggtgggggtgatgctgagaaccactacaagctcaggggaaatacctggcaatgtgccctggaccaccacaagagtaacaagactatgttgctgagactactgaccctgaaactgtccctgtcggccagaataacaactctgaaagctctgaagcgacggtacaatgataggagttgatgttgcactgcgggatacctgaagtgctgactagaatggtctaggaggatgacctctgccaaaagaatctctacctccagatgaggcaccactgaatcggccaaaatgacgaggcctcttgtcagacccccgaccactgccctgtaataagaccatcttaatccgcctggccacattggtcgcctcctgaaatgaaatatcagtacctgtctctctagccatctgtagcctaatcgactgagctaacccctcaataaacctcctcgctctctcccgatcggtggggagtatcatgatcgcatgtctatcaaaagtgataaaccgggtctcatactgggtaactgtcacagagccctgctggagacgctcaaactgcctccgaagatcctctctctgggtaactggtagaaacttctccaagaacaactcaaagaactgagcccaagacaaggacgaatatccagctcgtctggtcaagcaataatccctctaccaagtcttggcgggaccagaaagacggaaagtagcaaaatcgaccccattggtctcaacgatccccatgttccgaagaacatcatagcaactgtctaagtaatcttatgggtcctctgatggtgcaccactgaaagtagtaggaagcaacttggtgaaccgatccaatctccataaagcatcagtagtcatagatgctccctcaatgacatgtgccacaatactcggctgagctactcctgatgtctgaggtgctggagtttggaactgagaagctaacttctctggtgtgcgggtagtaggagtctgggcccctcccccagcatgagagatggctggtgctgtaggaagtagacaggcctgagccacgatctccataaggcccactaagcggaccagagcgtcctaaagtatcggggtttcaatgaacccctttgggacctgagctggtccatatgggactgtctgtgtaggaacctcctcagcaatctccacctaaggatcctctactgggattgctgctctaggctgagccctggccctgcctcagcctcagcctctagtaggagctgcaacgggagcatcaggttgctggtcggtagatgaggaagcacgtgttctcgccatctgtgagagaatagaatagaaactcagttagcattaagaatttcaaatcgcacgacagataagaaaagatgtgaagttatttttaactttgcagcctctaagggacaagtacagacatctccgtaccgatccctcagactctaccaagtttatccgtgacttgtgagacctaggcaacctagtgtcgcgcctcctttttctatcacacgggttaggtatggagaggtcgggtttatgacattttggacaactccttaaaagaaagggtttaaggaagagttgccacctaacgatttttatggtgcgttagggcacctagagttgataactcatgaactagttcgcgttaccagagattgggtaagggcttgaaattatcccaaggggaaggtgttaggcacccctcaagatccacaaatatgggtcccagccaataagttttgtgaatttggacggtgaacaagtaacaagtaaggttcatataagaggggatttcaaacaagcttaaaattcttttggagaaagtataaataaacatttgaaaagaaactaccctaggtttaaagtaatacggatcactacatgtggtattagcgcactggtcatcatatctgtattctacccttcccaccccgtaaaggtttttaaaaatgcgtgtgttggtcacgaatgcttattgtgtgccattacccgtcccatcctataagtcctggagggtgtttaggactactaatcctacaaggcaggaactaggctgaacccttaggtttaacggacaaaatataggcgacatacaaaacaagtaggactgcacatatgaggggacacataaagacaaagaaaggctcacagatccctccacacatagacatgtaagtagcacgtctcacacatgattaaagtctcaagacatgagttcaaaatagggattttagtaaaataggttgtaggaatctgggttaaaaaacttaatgaagactgaaactttaattaagactgatagttgatttcaaaatatacagtagctaaaggcagtggcaaacttagaaatatgcggtgatttaaagctttcagtaaacatagatggaggttattaaagcagtggttagaagtaacttagtgattaaaaaatacagtggttagaagtaacatagtgaccaaaaaatacagtggcttaacatagaataataattatcagttttcaaagaactgtagtaaaagaagtagtgagatggtatcaaaatatagtgactttaaagacataaaaagcaagaattcgaaatggcgcgattttgagcagaatgaggcatcttttgaaatcccagtagtttgaaaacataatagaatgggaatcagtaagatcagtaaaagaagatagatgcacaacttagagactgtttaaaatagagcaggagttttagtaaaagtaaaatgcacttcagtgaggtaaaacaggagtgggagcagtagggttcaaaatgtttaaagagaactgattaaactagtggaacataattgatttgatttaatgcatatcaggactaaagtttgcctaggcgttgtatgcattgcctacttattttaagagggtgagcatgcatgtttggattctgatttaaatagatacctgtttgtaggaaattgtttcaagtagattaaacatattttatgggagtattagatcatgttaactaggcgctcaagttatgataaacaagaagtcctaagggaaggatatcttatgcataaattatcaccttaagacatggtttctatatgtcatgtttacaaaatgcatgagcaatacattatgatagccttttgttactcatttagttatactaggaacatggtgtcagatggcgtgaatataatagatatgttgaaatgaagcacctaagcatgattttaatgtatggtatgcatgtcctaagcatgatactattgcgcacgtagggaaataaagcctaagtcatgatttctacccatactacacaaaacatgcataattccctcccatattcactatccagccccaatcgtttgtttataaattattacagaccataacaaatgaattacagtaattgcaaagagaaaaataagaagttattctattgagagccttcaaacatgcccaatcttccagcctcatccctttcgagcttcacagccttacatagcctaggtgcggcaaagctcccaaaggtccttgtgagggccctggccaataccagcacccagcaattgccaaagttgagataggtgcagtgtagaattacctgcctcagtgtgtcaaagttaagaggggactcaaggtccctaagcaatgctcacactgagggggtggaacctaaaggtctaagagtagtgtgaagtgcaggaaggagtagttaaaaagagttgagtttaaaagggagttttgaaataacttggcttagaggatactaaaaacagtttgaaaaggaagcagtagaatggtcacaactcagcaggtatgcagaaatcaagaaagcaaacacaaataggggaaatggattgaggacaagtaatggtagcagcatatttgcagtaattagtccttagcacaaagttacagattttcacaaagtgtgatatgccaagagtttatcatatattatagatacatatatgagaatactaagtattataggtgcattagaagacaggcaattgatgaagaaacatacataaagagatgctagatatgcagaaagaagaagtaaaggatcacataggccataatgaatcatagagagcaaaacaggagccatgtaaggttagaagaagaagagagatcatagaacgagagtagacatactagttacatggtaggcaatagaaccataagtaaaagcacaaaagaaacaacaagaatcttaaccaaaattgaaacatattgttttagggtgttggaaacttaaattagaacataccagtgttaagagagagaataaagcagaagagagcaaaatgatagcactattagccttggcaataataggcaagaatagagagcaacaagtagagcaaagagaacagaaagagagtacaagagagtagtatagagtatggatgtctgtgtgtgttcgtgtgttcagtattgaaagagtgaagtatttatagttgaaaacaggtaatcaaataaggtaagaatcagaaatgcatggtaagaaaagaaggtagaatcccaatcagtcaggcaatcaatgacatggttcccttgaatcatgggattcaaactcagaaatggtaaagacatgcagccacataaggtaaggaaaatcagtaccatacctaaataaggaaaggacccaggcttgttaagtaatagggaaactcggaatcaattaactaaggaatcaagacaatcattcccttaggtcaagggattcaaaattcaaacggcaaaacacataattacataaggaaaagtaaaaattagtcaagaatcaacagggaaagaatcatagttcattaggtatagggtaaataattacagctaaatttgaaacattttaattaaggacatagacaataagaatatagtacccatcagataactcaagtgaatcgattgattcgaataggagaggtaaaaattgaagcctcgaaggaaagtttatcaatcaaaccccaatgtatggagtccagaatcaatcaacgaagagtcacaattctatatctaaatagacaagaacgaccatgcatattaaacaggaaagcttagcaatattgaaagaaagaggcaagagttgaacgaacatatgaataaaatcacgcagagatgtcacaagtaggctaaagactcattcgaagcatgatacttacaaaaaacctagcaggaatcaagcagcaagaagacccaaacacaaaagtccaaaaattagggcatttaacataaacaagataaaaagttaaaaaggcatcaagatatgtagagaacggacttaagaacgaaaggaaactcagttaaaaactagcacataagaggttttgggaaaccctagttttgaaaggaaacaaaacattttaaaattgaagaaacttaaagatcgaattgagaatagtgtaaaacataagagataagtttaaatcgttaaaaatacagagatttaagaggtttaagccaaaaattagggtttcataagaaaccagagaaaaataagagaatctgccgcgaagcttgaagtaatggtgattgtggcatggtcgtatcaaaccccaccagagaaggccggaaaatcaccaaagcaggagcctcagtagtggtctagcatggtcgaaacccacagaggtctcaaagacggagaggatcggagagataaggcttcaaggcggctggtggttgaaaggatgtgagcctggaagtggccggagatgaaggttggagaccatcggagaaccagaaggttctagagagaaaggggagaggaagacaccagaagagagagagtcagtctcgataaaatgagagagacggggggaggggaggggggttaggtaaaggttaattaaggtaagggatgatctgggccgttgatctcatttgatcaacggctcagattaaactaggggtgggtcgagtatggattaggattgggctgggtatttaattggggtttgggttggggttaatttggtttaaaatgtggctaattgttaaatacccttaaaaatagataattaattaattaaaataattaataattgtataaaaataaaattaagttaaaataggtaaaattacaataattaattaatattaaaattgtaagacacataaattcaaattttaaaaggtataaaatgtctaattaggccataattgcaaaatgattgtaattgtaattaaataaaacccaatttggccatttatgaaataatttgattttaataagtaaaaagtgattatgaatgacatactaaactggaaaatattttgaaattatttaaagcacaatttgtgaattatttaaatatgaaatattaaaatagacaggaaataatttaataaaaataggaagaaaataggaaaaatactcattattacaaagagtaatttagaagacttatatgcaagtttgcgaataatttaagaaaaaattgggtatctacaactgcctctctttacccgggaaggatgaaagagttgtcgggtaaagatatgatggccaattttgaccgagatgaaactgcaggatagaatttggccgcaccctggtatctgagctgcctacatatccctagtttaacatgaatcaggtcgtatgtagttctggaaatcactggcgaagtataccggtgatgtttcacaagaacggacgcaaggtgcgagataaggtaagggtaggaagttcttacgggggatgtcgaagaactggagcggtccgctcctgcctggttggttgttccggccgggttacctgcagatagagaacaagcgtatattgtgcataatatgatgcaagttcccgccggactatgaatggtatctttggacaataaggatgatgtccttagaccatgatgtcctgggccatgaattgctcagcgcgggattcgcaggctatgaaatgatgttctcgggccatgaggatggtgcctctaaacgatgatgcctttgaataatgatatgcaagttgaatataagagatatgcaggttatgaaatgatgttctcgggccatgaggatggtgcctctgaacgatgacgcctttggacaacttggcgatatttcagcccatgaagaatgcagtaatatgatgttggcaccacagaggttagtcttgagatttgcgaaaagaaagtgggcagagcttatcccgaaagaaggcgtaaataaataaggtgactgctttgaaaaaggtagaaatgagcttagcgtagtgcaataagatgcgaagagaggtggcgtagaacctcggaaggcggaatgatagccttatgcaatgcaggaaataaaatgcaggggaggtaacgcttaacctcggaaggcagaataggtagccttatgcagacgcgaatgcagatggaggtagagcttaacctcatgcagacggagacaaagcttagtctcggaaggcagaatggtagccttatgcagagatgcgaatgcaaatggaggtagagcttaacctcatgcagacgaagacagagcttagtctcgagaggcataaaggtagcctgatgcaaagatgcaaatgcaaatggaggtagagcttaacctcatgcagatggaggcagagcttagtctcgagaggcagaaaggtagccttatgtagatgcgaatgcagatgtaggtagagcttaacctcatccaaacggagacagagcttagtctcggaaggcagaatggcagccttatgtagtgcagaaaataaaatgatagtaagagttcttagctgacgatgaagtgtgattgttgtgaatgaagtaacatttgcaatgatgataatagtaagcattggcatgtgcaatgggctcgagagcgtatcattgagaaacatgcgtcttgtggggataatgagatgtcttgggctttgccgtatttgtgcctacatccaaagaaaaatcgtgagttccattaggggagagggttagttcgtatccctgctggctcggatcggcctgtctgcttgatgatgatggctttgtttgtaccacaggggtagcgttgctaagacaagctgtttttaagaaataaatatgcatgcttttataaaaatatgatataacatataataaaaaataattttcttcggatgaaccgacgaccatgacgcggttcgagacattacaacacctcttgctgcgaagatttgagggtcctcctcaacattttgccccaatttgatgggtgaaggcttctagctgttactggtgcggtgtttggttgaaattgcttcggaattttgaggtccctcctcaaaattctgccccagtttccattcgtgggggaaatgaaaattttattaaaatatgaacgaacccatagggctgcctacgtatcccctcttaaacgggaatcaggtcaggcgtagttcaatttacagagttgatataagcataacaattacacatagtagcgcttgactgtgtctgacttgattagtttaggacaaatttctctgtccatttctgccagtatgagtgctcctcctgttagcactcggtgaaccatgtacgggccttgccaattgggagagaatttcccttttgcttcgtcttgatgcggaaagattctttaataccagctgccccggtgtgaatcgtcttggtttgactttcgtgttgaaggatctagtcattctattttgatatagttgaccatgacaaaaccgcgttcatccttttttcgtctatgagggccaattgctcatagcggcttcttacccattcggcgtcgctgagcttggcttcttatataattctcaaagatggaatttcaacttcagcaggaatgactacttctgtaccgtataccaacatgtaaggagttgccctggttgatgtgcaaaccgtggtgcgataccccagtaaggcgaatgacagcttctcatgccactgcttgtgcttatttatcatctttctcagtatcttcttgatgttcttgttggcagccgcaacagctccattcatttgaggtctgtatgctgtagaattcttgtgcttgattttgagggcttcacacattactctcatcaaatcactgttgagattggaaccattatcggtgatgattgactctggaattccaaaccgacaaacaatgcggtcgcggacaaaattggtcacgaccttcttagtaactgctttgtacgatgctgcttcgacccatttggtgaaatagtcaatggcaaccagaataaacctatgtccgtttaaggcggtaggctcgatcagtccaataacatccattccccaagcggcgaacggccagggtgaacttgttgcattaagatcactgggaggtacctttatcatatccccatgtatttgacatcgatggcatttgcggacttactggatgcagtctgtttccatggtcatccataaataacaagcccaaagtatcttctttgctagaacaaagccgttcatatgaggaccgcatgtaccagcatgtatttcctccaacagcttcgttgcttcctctgcctcgacacatcttagtaaacccagatcaggagtcctcctatataggatttctccgttgtgaaagaagttgtttgataaccttcgaagagtgcgcttttgagtagcgtttgcaagttccgggtactctccctctgccaagtactccttaatgtcagctttccatctgcttcttcttcaacgtgggcgcagtaggccgactgattgtgaatccctgccgggataggatcaatgaagttctcatatggatgctgaatcatatatgacaaggtggccagtgcgtcggcgaactcattctggcttctaggaacgtgccggaattcaatctttgtaaacctctttctcaattcctgcacacgatgtaggtatggcagtatcttggaattcttggtcgcccattctccttggacttggtgtattaacaagtctgagtcactaattactaataattcttgcacattcatgtcgatggccaaattgagcccaaggatacatgcctcatattcaaccatgttgttggtgcaggggaacctgagtttggcggataccgggtagtgctggccagtttctaaaattaagactgctccaatacccacgttttttaagtttgcggccccataaaagaacatcatccaaccgtcgtaggattctgcaatgtcctctcctacgaatgacacttcctcatcggggaaatacgttttcaatggttcgtattctccgcccacaggattttcagcaagatgattggctaatgcttgtcccttgaccgccttttgagttacgtaaatgatgtcaaactcacttaacaagatctgccatttagctagcttgctagtgagcatgggcttctgaaagatgtacttgagcggatccttccttgatatgaggtatgttgtgtaggcgcagaaataatgccttagcttctgtgcgacccaagttaaagcacaacacgtgcactctaatagagaataccgaccctcatatggagtaaacttcttgctgaggtaataaattgcttgctctttcctccctgtttcgtcatgttgcccgagatcgcaaccgaaatctccatctaatacggccaggtagagtaataggggtttatccggctctgggggtaccaagactggtggtgttgagaggtactctttgattcttttgaaggctttttgacaatccccagtccatttggtggcatcatcttagcattttgaaaattggttcacaaatgacagtagactgggctatgaaccggctgatataattgagccatcccaggaagctcataacatccttttagttctttggtggcgacaattcttggatggctttgacttttgatggatctagctctattcctcgatgactgataatgaaccctagcagcttgccagcaagaaccccgaacgcacactttgcagggttaagtttcagattgtatctccttaacctgttgaagaactttctcagatcttccatgtgatcagcaactttctttgatttgatgatgacgtcgtctacatatacctcgatctctttgtgaatcatatcatgaaatatagtagtcatggccctcatgtaagtggcccctgcattctttagaccgaatggcatcatcttgtaccaatatactccccacggcgtaatgaatgtcgttttctcagtatcttcctcgtccatccaaatctgatggtaaccagcaaaacaatctacaaaggactgcagctcgtgcttggcacagttgtcaattaagatgtgtatgtttggcaaggagaagtcgtctttcggactagcccggttaagatcccggtagtcgacgcagactctgaccttcccatctttctttggtacagtcacaatgttggctaaccatgtaggatattcgaccactcggagaaccccggcgttgatctgtttggtgacctcctctttgattttcaagctcatgtctggtttgaatttcctaatcttttgcttcactgatcggcatgttggattggttggcagtttgtgggccacaatagatgtactgaggacagtcatgtcgtcatataaccaagcgaatatgtcctcatattcccttaagaattccgtatattccttcttttctgacggcaatagatgaatgttgatgcgtggttctttgacggtctctacgtttcccaagttgacgacctcagtctcatccaagacttaggtatgttctcaatattctcgacctccttaataatatcctcaggtatatcatcctcgtctgactcaggatccgtttgttgcgttgtctcgttgcaggtcacggtcgtcggttcatcaagataagtaatagtaatgctgtgtaaaataaagtaatggggaggaaaacagtagcaagtaaatataggatttataaagaaactggaaatgctttgataaattgaataattgtttgaacatgggagctctttcttgcagaaattaaaaatgcgaaaaggaagaaaattctttaaataaataaactataaataatgcttgttttgttagccttgctaccccgaggctcgacatgctttggtcgtcatgacggaccaattgttgagatgtgatcccttgttctcaacttgtatggaagggccttcctccccctcttcttcaagaatgacacatcagtccatatcctaatcatccagaaataaatcctttatcgccgctaacgcttcctcttcgtctgtaccatatatgatgtcagttggctggaaagtctgctctatgcggggtattggctgctccaatgggtagtaggggccgcgccatggtggcgaccagtccctgaactccttccaagtgtactcgtaccctagaccaaaagtagtaccgtgcttcttgagtgttattgacttttttattccttgaagatgcttaccgagccctttacccggctcgtacccttgccagttcaatatgctttcggttctactgccccacaacttgtctttgtcaacggcgttaacacgttctacgttgtgatagatttctccgcccaacttcctccttccatcgatgaccgaaaaggtctggcgaccatagatatggttgctaccgtcgccatgaatgattacctcttggtgattgcattcaaacttcacggcttggtgtagggttgatgccacggccccagcagcatggatccaaggtcgtcccaacagtaaattgtaggatgcgggcacatctattacttggaaatctacatcgaaccaagttggtcccatttgtaagcataaggtgatttctcccatggtggacctttgagaaccatcgaaggcttttacgttgatctctccttcctttatctcatgtagactcttgcccaatctcttgagtgtgaccaacggacaaatattgaggctggaacccccatcaattaggatccttgtgatgaagtgatcctcacattgtacggtgatgtgtagtgttttattatgccctataccctcgtgcggtagctcatcttcgtggaaagtgatattgtgactttctagtatctggcccaccatgttgtccatttccccactggtgatattgtctggcacgtatgcttcacttagcacccttagcaaagcactcctgtgagtttcagggttttgtaacaaggaggaggatggatatttgagctggcgttttgttcaactggtcgaggattgagtattctttggcttgtatctttctccactgatcatctgaacatgtttcaatgataggggcggttgttggcctactttctagattcggccaaatggtcaggggtataaactctgccagttcttgtcataccctgtgcagcgatggcttcttcagacttgcctttacctttcctccttgcttcagcggtatagtccaacgaaatggcctctgagtaaaagggtgtcgttggtgacattgccactgggatgggtgtggtcattcttattcctgccggagtatatgttatagatgaatggattgcaacttcgagcggtcgcacaaattcaacttcgatcggtcctggggattttcctttggcaggtgatcttgattcaaattcaagtggaatggacatgtttacctcaacttcctcagatggctgcatctggaccacgatcagattaggagtaatcgcaggcttcttcggatcaccctcgacaattagcccaattgatccctcaggatcccaatcatcttcaacctcaatcatgtggacaccgcctttatgttcgggcagcgaattattgcgaacattaggatcagggcccttggctataagtatcttgttatctatgagggtttgtatcttgtctttcaaggaacgacattcctcgatggtgtgtcccttcatgctggagtggtaagcacaggttttgtttgggttgacccactgagatgggttctcagggatgatagcggggatgggtgtgacatagccggcggctttaagcttttcatataatttgtcaatgggttcagctatggtagtatactgttttggtggacgacggtcgaagtttgggcgaggtctcgggaagttttggcgattaggtggtgattgatagtgagaaggttgagaattataggcattatagacgggagctggttgtgagtatctgggcgaggtaggctaatatgtggatggttgagtttggtaggtgggtgagggtgtctggttttgaggtgaaggtgcttgggtaacttggagctggttggtatgtaaaggaaggtgtggggtatacttcgtatttgggaggggacttggcttgttgtgccaccatcacggctcctacatcctttttcttggatacaccaccggattgcagagctttattggtagcctgtaaggcttcaaagttagtaaccataccgttttttatgccttcctcgattcgctttccccacttgatgatatcagaaaacttgtgcccctcgaccatcatcagccgctcatagtactaaggatcctgagcgcgcacaaagaatttcttcatttgttcttcttccaaggctggcctgaccttggcagcctctgacctcaaacgagtagcatactcgcgaaaagtctcagttggtttcttcttcaagttctggatgtagaacacatccggtgcattctcagtgttgaatctgaatctatccatgaagtccgtagccatattcatccaattgatctatttctttggatcctgattgatgtaccaggatagtgcatcacctttcaaactcctcatgaagagtttcatgcagatcctttcatctattcccacgccgaccaatttttcgcagtaagtccttagatggactctcgggtcaccagtaccatcaaacatctcgaacttaggaggtttgtacccctcaggaagttcaacatctggctgtatacaaagatcctcataattcaatccctcaacccctttaattccttcgatgccctgaactcggttggtcaatttcttgagttcctcggccagattcctggtgagcttgtccttctcgtcggactcataggtatgcattgtggaatgagctatggtttccacataaatagggttgtcataagtctggaggtggtctctcgtttgatcctggagaggcagagtgttgtggtgacatgtgttgcgtggtgctggtggaacgagatctttggggtgattgggttgttttgggacattttggggtaaagtggggttcagagtttttgggaagtgaatgtctggaacgttgagggagaatgataagtgggccaaattcttgacttggtcaagttcctcttggaacttcagcaacttcttctctagtggggacataccctcgtgcagaacctgaataccctgaccatcagtgatctcaacctgttcattcctgttgtcttttctagtaccgcttgcattttccatcttagttttacccttgctttttcctttgggaggactgtgaggaagagtaggaggagggccctttgatctggtgcaataagttgttgatgccagagtgcacgaactaacctttggggaaggggaataactaacaaaaaggcagtgaagttagtgaaggttataaagaatatggcggtaatttaaacacgtaatgcgaaagtgtaaaatgcatcctaagttggggaacctcttgatgcccgaggtaggcctaacgacaaattaatttggagagacttaaatactaaatgcctcattttattgatgataaaatagacaaatccaacttgactctgaaaatacggaaatgtaaaatgttactaatggccagtggcctcattacatcaaaagcaaagtaaagacaaatcctatctatttggtctcagaaggaccttccccagactcggaacctctacttgccttgatcaacgttcccatcttgcggagtcccaacagtaagtaggtcttggctagaattcctacttcagttccctcggtcttttgacaagtctcgatcctcctaaggaacttttcctccaagtcaactctgcctcgttcgaagtgtgctagcctctgggtggaagtgatggccatgtccttccattcctcgatcagctttttgttggctatgtggattttttgatgatcttcttcacagtcacggagccttttgcgaagatggttgagcctagttgttgcctcggctttctcatctatgaccctaagtcctcgagcgaaccctggctcaatacttcctccctagttatcttccaaccatcccagatagtaaggagagcaaccagcatgatacctgtcaggctcgatagtatccttctccaacctgatcctacaatgccacaattgctgagcttgacacttgtgagggcggtcgtcattttggaagtccgccctgagatgactcgttttctcgaccattaggacgacttgcttccttcctgcctgcctcatgactcgaatcggtacgtaagggtacgtccctctaagaccaatcaatatcaggaacatggtgtctctagtccgaatgatgaattcgtctgtcaggaaccactcgaacatccatttgatttgttcctcggtcagatcttctaataactcgacccatccattggcattctctggctgtgcaaacatgttggggatatagttcatacgttttggatgatggaaagcaatatgatcatcctaaactctcctatatatgtcttgatggtagtcacccctttgaaaatgctcgatgagccaaagctgaagtaacaggttgcaatcaaaatgtttcgctcctcgttgacagttttccaaagctcggtatatgtcagtaacaatcataggtacaatgctgaaatcctgcccgtcgatcccttccatcagagtcttggtaaccatagccaatctggtgtggattctcccttttgtagtcgggaagaccatcaatcccaaaaaacagaatatgaagacgaatacacggcggtgaatgtgtcctagagaggtgagggagaacaactcttcctgatatgtgcggtaagactgactacggccatacctctcagataaatagtcaaaggggatgtacgagtcttccaagcagactaaatacggattcttcttgagtcccatcattttgagaaaaccccggcctgttcggttttcaggcatcaataacccttgagactcccaaggcaaaccagctaaaccacttatctcctctagcagcggtgtcatctcattgttcccaaatcgaaaaaccgatcgatcacaatcccaaaataaggtggcagcctctatcatcatgttattaggctgaatgtccaaaagagagggcaagttgcctaggtgttttctgactgctattttgtcgcttgaatgcaagtcttcccaccagtttagaagttttggatggatgttggtgaccatgccaaacccggggacctcgtgcctcatctctgcaaaataaacaggttaggcccttacccccaccggacttgactatttaacatcaataattagaaatgagcatttaagttctccaaataaatgcacagaaagtgaaggcgtccttttgggttccagggaaacccaatggactttggacgaggctatcttaaaggctattgtgagtacaacacgttagcctagctaggttgaccatgatatgcaacatacaatagcgtaaggtttctattgggcttttagattggtacccttgagcggacaactcaagggggaaggcacagaaccgtcgactccaccgctgatcgactagttttacggtaaatacaccttttcgaatttaggggtgataatactggaatagcgcaaccactcattgtaagcgttgctataggatttgtttggcacgagtggaatatgaatacggagcatgatatgtaataataagcattaaaatagataggcacgtattttcaccttgaggaaaacggtaaagaaaggaaatacaacaggtataatggaaagcggttacaaagaaaacatgaagatatgttagttacgttcgggtgaaataaatacttgtaaaagtaaacaattaacagcatataacggggaataggaaaaggcataagcttttaaatgcaaattaaaggtccaaatttacaaagtaaattgtaatggtataagcctagggaagatacccagcagagtcgccatgcgcgccccctttttctatcgcacgggttaggtacagagagatcaagtttatgacattttagacaactccttaaaagaaagggtttaaggaagagtcgccacctaacgatttttatgctgcgttagggcaactagagttgataactcatgaactagttcgcgttaccagagattgggtaagggattaaaattatcccaaggggaaggtgttaggcactcctcaagatccacaattgtgggtcccagccaataagttttgtgaatttggacggtgaataagtaacaagtaaggttcatataagaggggatttcaaacaagtttaaaattcttttggagaaagtataaaataaacatttgaaaagaagaggaggattgccaaagttgagataggtgcagtgtagaattacctgcctcagtgtgtcaaagttaagagggaactcaaggtccctaagcaatgctcacactgagggggtggaacctaaaggtctaagagtagtgtgaagtgcaggaaggagtagttaaaaagagttgagtttgaaagggagttttgaaataacttggcttagaggatactaaaaacagtttgaaaaggaagcagtagaatggtcacaactcagcaggtatgcagaaatcaagaaagcaaacacaaataggggaaagggattgaggacaagtaatggtagcagcatatttgcagtaattagtccttagcacaaagttacagattttcacagagtgtgatatgccaagagtttatcaaatattataaatacatatatgagaatactaagtattataggtgcattagaagccaggaaattgatgaagaaacatacataaagagatgctagatatgcaaaaagaagaagtaaaagattacataggcgataatgaatcatagagaggaaaacaggagccatgttaggttagaagaagaagagagatcatagaaagagagtagacatactagttacatggtaggcaatataaccataagtaaaagcacaaaagaaacaacaagaatcttaaccaaaattgaaacatattgttttaggatgttggaaacttaaattagaatatactagtgttaagagagagaataaagcagaaaagagcaaaatgatagcactattagccttggcttgcagccggctaataataggcaagaatagagagtaacaagtaaagcaaagagaacagaaagagagtacatgagagtagtatagaatgtggatgtctatgtgtgttcgtgtgttcagtattgaaaaagtgaagtatttatagttgaaaacaggtaatcaaataaggtaagaatcacaaatgcatggtaataagagaaggcagaatcccaatcagtcaggaaatcaatgacacggttcccttgaatcatgggattcaaactcagaaatggtaaagacatgcagccacataaggtaaagaaaaacagtaccatacctaaataaggaaaggacctaggcctgttaagtaatagggaaactcggaatcaattaactaaggaatcaagacaatcattcccttaggtcaagggattcaaaattcaaacggaaaaacacataattacataaggaaaagtaaaaatcagtcaagaatcaacaaggaaagaatcatagttcattaggtatagggtaaataattaaagctaaattcaaaacattctaattaaggacatagacaataagaatatagtacccatcagacaaatcaagtgaatcgattgattcgaataggagaggtaaaaattgaagcctcgaaggaaagtttatcaatcaaaccccaatgtatggaatccagaatcaatcaacgaagagtcacaattctatatataaataggcaagaatgaccaggcttattaaacatgcaggcttagaaatattgaaagaaagagacaagagttgaatgaacatatgaataaaatcacgcagagatgtcacaactaggctaaagactcattcgaagcatgttacttacagaaaacctagcaggaatcaagcagcaagaagacccaaacacaaaagtccaaaaattagggcatttaacataaacatgataaaaagtcacaaaatcatcaagatatgtagagaacagacttaagaacgaaaggaaactcagttaaaaactagcacataagaggttttgggaaaccctagttttgaaaggaaacaaaatgttttaaaactgaagaaacttaaagatcgaattgagaatagtgtaaaacataaagaggataagtttaaagtgttaaaaatcagagatttaagaggtttaagccaaaaattagggtttcataagaaacaagagaaaaataggagaacctgccgcgaagctcgaaggtaatggtgattgtggcatggtcgtatcaaaccccaccggagaaggccagaaaatcaccaaaacaagagccccagtagtggtccagcatggcccaaacccatggaggtctcaaagacggagacgatcggagagataaggcttcaaggcggctgatggttgaaaggaggtgagcctggaagtggccgaagatgaaggctagagaccatcgaagaaccagaaggttctagagagaaaggggagaggaagagaccagaagagagagagtcaatctcgatgaaaatgagagagacgggggggggggggggggggtaggtaaaggttaattaaggtgagagatgatatgggtcgttgatctcatttgatcaacgactcagatttaattaggggtggccgggtatggattaggattgggctgggtatttaattggggtttgggttgggattaacttggtttaaaatgtggctaaggtttaactaaaatgtggctaattgttaaatacccgtaaaaatagataattaattaattaaaatagctaataattgtataaaaataaaattaagttaaaataggtaaaattacaataattaattaatattaaaagtgtaatacacataaatttaaattttaaaaagtataaaatgtccaattaggccataaatgcaaaatgattgtaattgtaattaattaagacccgatttggccatttatgaaataattgaattttaataagtaaaaagtgattatgaatgacatactgaactggaaaatattttgaaattatttagagcacaatttgtgaattatttaaatatgaaatattaaaatagacaggaaaataatttaataaaaataggaaaaataggaaaaatactcattattacaaagagtaatttagaagacttatatgaaagtttgtaaataatttaagaaaaaattgggtatcaacaccttgtgctctgataccaacttgtcacgacccgaaatttccacaatcgagaccgtgatggcgtttaacgttgtacccgctagaaaagccaacgtaattgctcaaatttattaaaaaactttattattaaataagaacaagtgaaatacgaattttccataaataaaagataacaatgagaacggataaaagaattacataactagatccacaaactttttacgaattctcaaaataaccaacccagatctttgcagtcacaatgtcacggactatataagattaatacataaaatggtctgaaagaaataatacatctgttttgaaatactaaaacataaatgaagaagtagaaggggacgccaaggcctgcggacgcctgcaggactacctcagtgtctctgtgtggactaaaggaagccgcctagctccatatccactgggtcctgtactgggatttgcacaacaaaaattgtgcatgtggtgtatcagtacaaccgaccctgtgtactgagtaagtgcgagcctaacctcggcgaagtagtgacgaggctaggacacgacaaataatatcacctgtgcaatatgataatatactaaagaaataatgacaggaagtgaacagttaagtacaaaaaacggggggggggggggggggggggaacatactggggaaaagggatagcaaataacaagtataacggaataaggaaacaatttaaatatcaaagtaacaacaaaaaataacaactcagagaaaacaagtgtacgacatcacccttcgtgctttcactctcatcctccccaaaacaagtgcacggcatcacccttcgtgcctttactctcatcctcaacaaaacaagtgcacgacatcacccttcgcgcttttactctcatcctcacaaaaacaatagataaatagaaatggcacgacattatccttcgtgctattaatatcatatcatggcacgacatcacccttcgtgcttttacactatcatcctcacaataaataaatacacggcatcacccttcgtgcttttacactcttcctcgcccaaataatatcacaacagcagtttggcaaggaagaaatcaacagcatgaaccataacaataaatcatcacatcccggcaagggaacaacaacataaataacatcgtcccggcaagggacaaaactataaccaatctcactcaagtacataactttacgttatattcctcaaccgaaacaaaggttcaacagtactcacaacccagaatttccatcaaatcaaccaccaccaaagtgaaatttaatccaaagtacaataaatatcaatggaaatcacaaaattcataatatccgactcacgggcatgcttgataacaacatataggtactcgtcacctcacatatacgttgaacatggaataaacacatagcaaataggactgaacacctattccctcaagctaaggttaggaaaaacacttacctcgacctccgcgatagaaatcaagcctcaagcaccgctttttctttcgaactcgactccaaatacattgtatctagacataattgactcgataacatcaataaatgctaaactattcaattccaatgcttaattatagactttctagcctgcatggtcaaaacacgaggttcggaccaaaacccgatcacccattcacccacgagcccgaatatataatttgttttgaaatccgaccccaaaacgaggtcaaattcccaataaatcaaaaggccctaacactacccaaatccctaattttctacccttaatctcatgttttaggcctagaaatctaatgagtgttgataaaaatggaatgaaatgagtctaagatcacttacctatgaagttatggtgaagaatttcttccaagaatcgcccaaagtggtgtgaagaaggagttgtgaaaattgggtttaatcccgtaagtgtattctgttttttttactgaaaatataactaggcaaaaatgctcttctcgttcgcgaagagttgacttattagacctatgcgttcgcgagcgtggggccgcgttcgcacaaggttaaagatacccaggccccaggtcccctctaaagttatgcgttcgcaaccacctaggtgcgttcacatagtttccccttttctatctcccgcgatcgcgactaagggaccgcgttcgcactaagtaactagctacccagccccagcctgtcaccaaacctatgtggtcgagacagaaggggtacgttcgcgtagagaaaggaccttaaagctccgcgttcgcacccagctctttgcgttcgcgtagagcaaatccagcccccatcccagcctgtgctatgcgatcgcggaggaccttatgtgatcgcatagtacattacaccagacaccagcaaccagttttacaccacatttataagttcaaaaacaccatgacgcctatccaaaacacacctaagccctcggggctccaaaccaaatatgcgcacaacctcaaaacatcctacgaagttatttgtgtaatcaaatcaccaaaataacagcataaaaaacgaattaaaccccaaaatcaatgaaatgtttcaaaaacttctaaaacatcaaactttgcatttatggtccgaatcacgtcaaatgacttccgtttcttaccaaacttcacagatatgacataaatattatattaaacctgtatcgggctccgggaccaagataaaggctcgataacatagatttcacatacaaattcattttcaaaaacctcttatattttcagaaaataatttcttttaaaaattcatttctcgtacttgggccctcggaatacgattccaggcatacgcccaagtcccatattttcctacggaccctctaggaccgtcaaatcacgggtccgggtctgtttaccaaaaatgctgaccaaagtcaactcaatacaattttcaacacaaaattatctttttcctcagtttgtcgcataatggattcccgacgacacgctcgggctgcgcatgcaaatcgaggtgagatagaaggaggttctcatgacctcgtaacacagaattagctagaaatacacaggatgaccttttgggtcatcgcatgagcttctgaaagctctcctcacactcctcagtccacttgaatggaacacccttttgggtcaatgttgtcataggtgctgcaatggatgaaaatccctccacaaaatggcgatagtaccctgccaaaccgaggaaactgcggatcttagtaggtcatgacagtctaggacaactctgcaccgcctccaccttcttcgggtctaccttgatcccatcacaagacaccacatggcctaagaatgccacataattaagccaaaattcacacttagtaaattttgcatacaatttcttctccctcaaggtctggagcacatccctcaaatgctgctcatggtcctcttgggaccgagaatataccaagatgtaatcaataaacacaatgacgaaagaataaatataaggctggaacacactgtgcatcaagtgcataaaggctgctggggcattggtcagccgaaatgacataacaagaaactcatagtggccatatctgatcctgaaggcagtcttcgggatgtccgactctcgaatcttcaactgatgatagcccgaatgcaggtcaatattggagaataccctggcaccctgtagctggtcgaatagattatcaatgtgaggaaatgggtacctattcttcattgtaaccttattcagctgccggtaatcaatacacatacgcatcgaaccatcctttttctttacaaacaataccggagcaccccaaggtgatacattgggtctattgaaacccttatcaaataactctttcatttgctccttcaactcaggaggagccctacgatagggaggaatgggaatgggctgagtgcccggcaataaatcaatgcttaaatcaatatctctgtcggacggcatacccagaagatcagctggaaacacatcagggaagtccctcactactgggactgactcaactgtaggggtctcaacataaacatctctcacataaaccaaatacgcatcacaccacttctcaaccatctgttatgccttaagaaaagaaatgacccatgcggggagtacactataaggtacctctccactccaatctcggcaagcctggcatagccaacgtcatggttttggcatgacaatcaagaatagcataatggggtgacaaccagtccatgcccaaaataacatcgaaatctaccatactgagtaataataaatcagccctagtctcaaaaccacttatgacaatcaaacacgaccgatatacacggtccacaacaagagactctcccacgagagtagaaacataaacaacggaactcaaaaaatcccgagatatcctcagatgtgtagcaaaataagaagacacatatgaatacgtagagactggatcaaataatactgatgcatccctatgacaaacaaggacaatacatgtgatgactgaatctgaagcaacgagctctgaacgggctggaagagcatagtacctggtctagcctcctcctctagggcgacctcgacctccccgaccacaaccacgagctgctagaggaggtggggcagtagctggggctggaagaatatatggaggaccctgtggagcacgtggggcctgataagactgagatgatgcacccctcctatctttggggcaatatctgagcatgtagcgaggctcaccgcaccaaaaacaacccctcggaggacgtggcggttgatgctaactctgaactagcctgctggactagacggtgatagcacctcgagcattaggcacactagatactagtggtgcataataaggctcctgaggtctaggaggagctggaataccgctagctgttggaagagctaaatgaacagggcaactcacaaaaaccctaccatagcgtgttgctggtgcacgaactcccaaaaaatgaccagtctctcaaaacctctccgcctctctctcctccttgtcctgggctaacatactctcaatcctccgggcaatactcacgtcctgttgttaagtgatatctgtctcaaactccctggccatactagtctgaatactgtggtggagtcccgcaatgaagcgtcgaatcctctctctgattgtggcaaccaaagccggtgcatgacgtgccaagtcattaaaatagattacatactctaacaccgtcatagtaccctggcataactgctcaaactctacacgccaagcatccatgaggctctaagggacaaactcaagtaaaaatatctttgagaatggagcccaagtgagtgaggatgcctcatccggactacttagctcaaaggcacgccaccactgataagccgccccccttatttggaaagtgatgaaagaaaccccactcgtctccacaatacccatagtgcggagaatgcgatgacactcctcaagaaaaccaatagcgtcatatgaagctagtccgcagaaatcaggtgggtggtacttcttgtacctctcaagtctgagctgctctacctgagaagcagctaccctagcatcatgctgagctggagccgctgggggcataggaatatactccggaacctgcctaacatggacctctgctcaggagtacgggctgcgggagtgtgtgcccctctctcgacctgagatgtggctggagctatcggcagtagtcccgcttgagttagagtgatggaagcgctcatgaactgagccaaagtatcctggagggctggagtaacagtaggaacctcctgtgcccctccaattgtagttgttgagggctcctccgtctctgctctcgctggtgctcgggctgcaccgtgtgcttgtcctctacccctgcccctgcctctggctgggggttcgggtgcctgatcatcagtacgtccggtacgggtcctcaccatatgtgggcaagtgtagattagagttttagaagtttgatgacagtaactagcacgacaaggaattccaaagaatgtgattgttcttaacatttacatagtctctcaaagatagatacagacgtctacgcaccgatccccgagactctaataaatcggattgtgacttgtgactcctatgaacctagatgctctgataccaacttgtcacgacccgatttaccctccaattggtatcgtgacggcacctagtctctacgactaggtaagcctaaatttgcggaaaaatatagataataaaataaagacagaaagaaaaacacaagtagacataacatagccgatcggcatgtacaaatataacttcccaacacccgaaatatcacatttagtcaaaaactctataccaagatagctctatacaacagaaaggaaatacataagatgtctctatctaaaacaagaatggaaggtgactcgaaggggatctacgaacgcggcagaattacctcgtggtctcctcaaagctgctacaaggactcctagccatggaactgagtactggtacctggatttgcacacgaaaatatgtgtaggaaagggcatgagtacaccacaattggtacctagtaagtgccaagccctaaccccagtcaagtagtgacgaggtcagtttaggctctactgaagtttataagtaaaacagtttaaaatagtacagaaggatagaatttctaagctaagcagtaaaaatgaataatcctaaaataaaacagcaacagggagcacttggctcaccacaacgtagcacacagcggaatctcccgggatacgtctcgtagttccaaatataaagatgcagtacaggggggaaagctcccgaaatacgtctatagtcccaatgtaaatatgcagtacagggggaaaactcctcgaatatgtccgtagtcctaatttaaatatgcagtacagggggaaagctcccggaatacgtctgtagtcccaatttaaatatgcaatgcgaatggatgccggataaggtgtatttcaacagttcaggaaaaagtcatggacaagattaagataaagactaactaacatggtgcacattgtatgaaatagggaatttaggtgaaaaaggtaggcttcttcctaatctaaaatacacaagtagcacattaaacagtgaaataagagtaaaatgatttatggcatggataggaaaaatggaattttagcaacaatggcccgtgtacgtattcgtcacctcacgtacacggcgcccatacaacaaatagtatcaaaacaacctaaggggaagtccccaacatagttaggcaagccacttacctcgactgctctactcaactcaacaccacgctcttaccccgagtacctgactccaaatggcgcaaatctattcaattcaattgcataatgtaaatatcacgttaagtaatcattatagctaaccatacaagaattaaccccgggcccacgtctcgaagttgggtaaaaattacaaattccgaccacccattcactcatgagtctaaccatacaagaattaatcgaatcgaataccaaaatctcgatcaaaactcaaaatcttggcctaagaactttatccaaatattccccaattttccaccataatttcgaaattaaaggatctatttaagtgtataatcatggaatttagtctaaaccgagtaggaatcacttacccaaattgcccaggtgaaaatttcttaaaaatcgcactttcccgagctcccaagttcaaaatatgaataatggttcaaacccttgatttgggtgttttatgaatcttcccaggtcacgttcactgtgatcgtggaccagtcgcgatcggggagggtaacaaacacgcgcctaacttttcctctacgcgaatgcagggataagctcgcgaacgcgttcctcaacatactcatacctacgcaatcgcagttggattcacgcgaccgcgtagaagtacgctaaaacacctgccaccttatttcttctacgcgaacgcaacaaggcccacgcgaacgcagtggccaaggctgcccaacctatccgatcgtgttcctctttatgcgattgcgatgaacaaaatcctgcctgcctccatttactctatgcgatcgcggactctctcacgcgttcgcgatgaaggaaaaactgcaacaatttcaccagccaaaaccagcaatcacataaggctaaacatgcccgtatgagcatccgaaacacaaccgaggtccccgggaccccaaccaaacttaccaaccagtcctaatacctcattcaaacttggtcaagccttcaaaacacatcacataacaccaaaatcaagaattatacatggattcaagcctaagaacttatgaattttccaaaatccacaaccgataccgaaacacgtcaaaactagtccgaatgacctcaaacttttacacacaggtcataaataacactacggacctacatccactctcaaaaattcattctgagcctgatatcaaaatttcacctatcgaccaaaatcgccgaaattctaactttcgccaactcaatcctaaatccactacagacctcgaaaacatatttcggacatgctcctaatcctgaaatcacccaacggagttaacggagtcgacaaaattccattccggatccgtattctcacagttccacctacggtccgatttctaaagcttaaactcacatatagggactatgtgtccaaaaactccccgaaattcacaactaaacattccgaaaagtcccaaaagcagaaatagacatgaggaaaaacttattagggaattgaagtgctgactctcaaaacgaccgaccgggttgttacaagtagccacacacaagagtgcaagaaaaatctcataattttttattcatattgtctataataatctatgtctaaaaacaaagaagaaaccctttatatagagaggggtcacgaaattgtacctaaaaacaaggaaataaagtcctaaactactttggacaacaagtccaactaccttaggaaaagaaaaatactaggaagcaaaaaccaggtcattcttggaaagtaattcgaaaacttttagtaaaaggaaaacataaccttaactaactaggaaagcaataaatatagtcccataatatatggaaataagtcccaaaccaatcttggatagaatcttggaaatcttgaaggaaattggcaagcaacttggtacaaacttgcactcaacatctagcacggctattgtatccttcttgaacatcgtgtaagtcctttttatactatgaaaacgtggctttatgtaggacttcatgggctgcaagtttggacacatattaggtgccaaattggttcaatagttgactgactacgaccttcttcaaagcatatctcttaggatccaatcctcctcttgtttgacataaacttgggccataaaaaagttgtaatatctagccaattcatatccattatccttgagctctttcatcccagttaacaacttctttacttgcacttgatgtctaatgaccttgtttggcaacactttagcttgacatcttgttaaaggccatctttgagattccaaagatccattcttgtccttgaatagatttgagcttcctaggatgctatcacttaagattgactttgcttacattgtttcgtttagggaagcgtcttcctgaatgacctttaagggttgttcttttgtcgtccattcttttagcgctggaacgcaatctgaaattctcatgaagtcgactattatcaaatcactcagtccctaattcatatttgtttaccttgttcactagcccatactgatttctattaccttggggtctaacttttcctgctagtaatcacgttagagccacgaacttatttctcgaaatgaggatatgactttatgacctatactcttttgttgtctcaaggcctgtcacttctcgtcatttccttttcttgactataggctctgtaatgctatcgtttttgttttgatctgccgttgtcatccatgtatcacatcttactcataatgcttcattaactctcttcttatttccctactaacatctttgtctatcactttgttctgaaaacttcaacaagacattcttttgcttttagctccccttactccaaccactagctctttgggttgcctaacattctctctctactagggacgggagccacactaagataatatatctatctttgtagtacttatatctagctgacgcaaaaaatccatccatctgggtgtctcacaagaagatctattagcacatttgcaatgtctttcggaaatgtcaactaacgtaaacaatccatccatccttttgggttactctaacccccgacggatccatatatcccgtccttctcttacaccatatccgttagtttccataaagcataactgagatgagtgaggccgattgtacatacctttactactgttgaaggtaactcaaaatttatatctcccttcctgaatggtaaataatgataatcttcactagttgggtaccttgtacctgccatgacccaaacctatgggccgcaacgggcacccgatatcttactcaaccgagtaccaacgtaacatatctttcttattgtactatcatcagtaacttggccaacatggccacaactggtaatgtataactataagtgggaaagcactgtatccatgaaccatcattcataaaaaattaatacatatgggtcgttaaggcctttgacatactatacaagatgaacctctgtctacaaagactttaagagtatttgacatcaaatgggacagggtaccggcctactcgtaagtctgccgcaacattctaacacaataacacatagactcgactgcattcccaatgaggtggagtcttaccgatccttcgctgaatgctaacctcatctactatgagggctcatcaaactaattttctatacttgaaggcataaatccagtgtgcccaacaaaggtcgtcagtgcgaataatgtaccgagtatgtaaggcacataaataagtatataaaccacatggaagaaacatggagtacatgactcaacatgtaagtctggataactctttaaatcaagaaatacatatagtgtcatgcatatgcgtatgaatgtcatgtcgttcatagttacatgtgttcataacatcatcaagcctctaagggcatcccatcatatcatctcggccactcgggggcaaaatcatcaacgtataccagctgatcaggtggtggtgtgtatataagccgttaccttttcttatatcgcatatatatatatatatatatatatatatatatatatatatatatatatatatatatataagcgtatatagtgacatctggtctggatcaatgtatatgtataaatgaatgcaatgcatgagaagtacgtcaataaaatctctcggagtgtcataagaccattatggtatcataaagtcaactttatcaacttacgtattttctgaataataggacacgtgaggaatcaagaacataagcatctttagcgtttctatgaatagagtcatttatggaagttgtgcatttgctcgtttcgtttgtgtcgtatggatcatgccaaaagaaaataagggatagccttaacatacctggaccgattctctttacaattcctctaacacacgtcttttgcgacaaaacatgtgacggcaagatcggagtagggaaaaatacatataatattcttgaaaaagattacaccgtactcccctaaaattgcaaaacctcacgttgatttgaattggtaaaggccttgcgttgcttatatgatatatgcagatgcatatatgaattactcatgttacctaccatctcacttacaaagtcttacttacaaaatcttacttacccatcttacttacaaaatcttaatgtttgagaatttccatccgttcctacatgtataagcatctcaatttgtgattttgaaaggccttttatataagtgggtgtgggccccacactttttatgactaagagggtgtttggctaagcttataagttggttaaactagcttataagcacttttcgacttttggtgaagttaaaagtgcttataagccaagtgcttataagtcaaaaataagctaaaatccacaagttggtcacccccgacttatgaatttttagattatacgcactttaagtttgaccaggatttttactattttatccttaaatattcctttttagaacaaaactcactacctcaagtagagttgcttatttggttagtatgattagtacatgtatttggtacaccccatgtttattacgtgaaagtacgccataagttaattaattaagatcaaataaacaacaagggaaactaaaagcaagaaaaatctaatttaagccgaaaaagatgaaactagcaaccagaaactcggtcataacaagtacaacttgatacactggaaatataaggacctaagaatcctaaaaggccaatctatttgcaaataagtccgagtacgcactcgtcacctcgcgtacacgggctacaataaacatagaagactcaaatcctaagggataattcccccacacaaggttatgcaagatacttacctcaaagacgacaacccagtactctaaattgaacttctcgggcgaaaagacctccggacggctcaaaatcaactaaaacaacttcaaaacacacataaaacttgtaaggaactattgtattggtaaaaaagagtctcccatgtaagcaagaccttgacaactcagctagctacgtggaccaaagaaaacatcacagatggacatgattttataaagaggtacgagattaactcaacaagcacgagcgcgagattgactcgacaggcacgggattgattcatcagccacgggtaacccaatgaagaagaagagatgcggtcgtaaagaacccaaacaaagccacggatagattctagaatcaacagttaatgacttatacgttatgtaactcctatataatagtaacggttatccgttgatgatcctttgtaacgtctcattaatgtaataattagccattaatgagcaattattatagaaaccaaaacgttatgctaggaagcccttatataaaagggaagaattgtaatccataggatcatctgaattctcgaatacaaactgctttacttttctgcattctatattgcttattatttctttattcattatattattcacttgattatcagtaacccgcgtttatcataaaatagctttggtcaaggaatctcattctttggttaaacaaattggttccgttaccaggaatctgataatcatggtgtgtttaccaactgatatcctttattccaacaacaacatcaacaacaacgtcaacaacaatgacgacaacaacaaacaaggaaatggaaccacggttccatctcctcgaggaacaccacgtgctttgagggaatcatcccttgaaagatctgataaccatcgtaacaataatgagcaaccaatagagcaagatcaaataaggcaaatgattgttgaatacgtggggcaggctttgcaagaatttgcgagaggattaccacaggcacctccagtaccactaacgccgccttcaaataatacaatcgtagtagagaatccgcagtctggattaataaactcaaccagaggtgaaacccccaatgcatctcttgaaacgagaccaggtacgactaataactctaagttacaaaatttattactaaccatgtaggaacagatgaaggaacagaacgattgcatcgagaaaatccctggagtaccgcctatcatcaagggcattgatgtcgatagatattctcaacaaccttggaagccaaatgcggctccattgcctatacccaagaaatttagaatgcccgacgttcctaaatatgatggaacaacttacctacgcaatttgcagattcgtttataaaagcacactctggtgcacaaaacgttgaaaaatgaatggaagatatattcaagacaaagcaaggatacatagaattgcttcgtgaatttgtagacaggtttcaacgagaaagaatgcaattagcaagggtgcctgacaattgggcagccatggcatttgcaagcaacttacacgataaaagctcgaaagccacgagatgacttaaggaaagtctgagagaattcccagctacaacatggaatgatgtgtataataggtacagtaccaaactcagaatcgaagaagatatcattgctcgatcaaaagatgaagagtatcccagaaccagacgtccagaaccagagaaacggtaaggtaaaaataggtacgatcgttacttaggaccttcgatacgtgacacacgtcctaggttcaaaaatacaagatcatcgggaagagataaaggctcatcctcatctaaatccagaagagatcgagatgaacagtccaggggtaatacctgaattggagaccataacttcaatgtgagcaatacttaacttgtctcaatattgagaaatatgggagacaaggttaaatggcccaaagaaatgcaatctaatccaaacaagaaaccttgatcagtggtgtgaattccacaatgatcatggccatagaactgcagattgtagatttttgcaaggtgaaatagaacatctattaaaacagggctacttaacagaattgtttagtgataaaggtaaacagacatatatgaagaacaggcaggagcccccaaaacctccttccccaaaacgaactgtcaacgtcatacatggaggggaagaagtgaatggcatggtctaccagttagcatcaaaagtcacaagtacccacgggaaacgagttccagaagagacgaaggaagataaaatatactttgatgacacagattttggcggattaaggcttcctcataacgatgcactggtaatatctttaattattcatgacactaacgttaaaagagtgttgattgatccaggaagttcagtcaacattattttgataaaagtcgtggaggaaatgctggtagaaaatgaaatgatcccaaaggcacgagccatatctgggttcgataattaaacattgataactaaaggagaaatcgaacttaccacttacgctgaatgagtcatcaaaaatgcaaaatttcaagtcattgatacagagatggcttataacgttatattgggaagaccatggatccatgatatgaaagcggtcccatccaccttatatcaggtaataaaattcccttcaaagtggggagtaagacagattagaggtgaccaacaaacttcgagaaatatcaattcgatagctcttcacaacagaaaagatacgggagagacagcaaattatcgaacagaagttcctcaacaaacaggtatggaaaaaacctctgatcaactatgtacaaaagaaatggatattcaaataggtacggaaggagataacgatgaaacaaatcttgttaccatcaaggatcagctagaacatgcagacatagattccggactggatttcattcgtgaaccagaagaagatgagcatattaaaacaattgttgaagaacttgaggttgttcctctttctgaacaaaagcccgagagaaagttgtatattggcacaaaattgctggaaagactaaatcttgagcaaaaaggtatgttagtcaattatttaaaaggtaatgaggattaatttgcatggtcccactcagatatggcaggtattccaccagaagtgatgactcataaactaaatgaagatccatccttcgcacctgttaaacaaaagaaaagaaagcaaggacctttcaaaaatcaattgattgacgaggaagttcaaaaactactaaacataggctctatacaagaggtaaagtatcctgactggctggctaacacagtagtggtgcctaaaaagaatggaaaatggagggtatgtgtagactatactgatttaaataaagcatgtcctaaatattcatttcctttgccacatatagatcaaatgatcgatgctaccgcaggtcatgaattgttaagttttttggatgcatattctggttataaccagattaaaatggattccctagatgaagaaaaaacttcattcatcactaacagggggacttattgttataagggcatgccttttgtcttgaaaaatgcaagggccacttaccaaaggttagtaacaaaaatgttccaagaacatttaggaaaaacgatggaagtctatatcgatgatatgcttgtaaaatcaacacaagcggaaaaccatctccagcatctctccactacttttgacatcctacgcaggtataatatgaagctcaatccggaaaaatgtgccttcggagtacaatatggtaagtttctgggattccttgtatctaatagaggaatagaagtaaatccggctcaaataaaagctatagaagaaatacctgaaattctgaagaataaaaaagaagttcaaagattaacagaaagaataacaactttagggagatttatttcaagatcttccgagaaaagctttaaattattttcagctcttaaaaagcaaaatcagttcgagtggactgaagaattccagctggcactcaaagacttgaagatttatgtaacgacccgaccggtcgttttgagatccagcacgtcgttcagcagttgggagtcatgaacagcttcatttcgggtattgtgacttgtgtgtattgtcagagttgaaattcaagaggttcggagttaaattgaaaggaaaattctaatttcagaagccttaagttaaagaaattgagtaagactagaattttgagtaaacgacctcggaatcaggattcgaaggttccagcaagttcgtatggtgatttcgtacttgggcgtatgtccgtatcgagatttggataacccgagagcgtttcggtgtatattgtggaagtcagcatttttgaagaatttcgtaagtttggcttgaagtgcatttcaatgatattgatgttcgtttgggattctgagtctggtaatagctccatatggtgattctggagttgggagcgcgatcggaagtgaattcggatgtttggaggtcattttgaagtcatttggctaaagatagaaatttgaaggtttttgagaattttgaccgagagtttgactttttgatatcgggttcggattccaatttcgaaagttggagcaggtccataaagtcgaatatgacttgtgtgcaaaatttgaggtcaatcggacgtgatttgataggtttcggcatcggatgtgaaagttggaattttcaaagttcataaagttgaattttagtgcgatttgtgatttcggcgttgtttgatgtgatttgaagcctcgagcaagttcgtgggtgttatgggactgagtcgtgtgatttggacaggggcctcggatgtgtttcgggccatttttctctactttgttgttgatgtcatctgatgtttctggtgtgctgtgcgatcgcatcccttgtagtgcgattgtgaaggagaaaatgggaggggtgattttttggtctgtgcgatcgcggtctcaatggtgcaatcgcagagaaggatttggagggagctggaaaaagtcctgtgcgatcgtaggcatgcttgtgcgattgcatagaagaaatgttctgctgcactgactcgatttcggaggctcatatctcacaatttataaggaattgtgagatgatgtaaaaatgaaagttgtactcctttgtttctaatttctataaatgtaaaccatttagcatttggatttgtttataaaaggatatggctgttacactacagggtgtccgggaagatgaagaccaaatttgtgtttcacggggctgaatttggaagcttatattatgaaatctataaggatttgggagatgaccaacacatgaaagttatagatccttaagcctagttttcagaacatcaaaccatttgtcatttggagttttgttctccacggtcgcgaagctctttccgcgatcgcgaagagaaaatattgggctagaaaattgttctccgcgatcgtgaagctttttccgggatcgcactgagtaaataccttggcagaatatttaaaaaatggggttttggccatttcatcaattcattcacttggttggggcgatttggaggattccaaagggtgattttcatcaagcatcaagaggtaagatattctacttatttccaagttaaatacaagattattacacggatttaacatgaaactttgtgggaaaattgggaattttgaagaaaacctagaaatttgaaaatttggattttagccacgaattgagcatgaataattgagtaaaatgtgtaattgaattagtaaagcttcgggtagggattttcttcaagaaatttcgaggtccgggcacgtgggcccgaggtcattttggtcatttcatgagccgggctaaggaactttgtaatttgaattggttatgatatattgagtataatttcattgaattatcgttatttggatagtttgggagcgttgcgcatccattttagtcgtcgtagaggcttggaagccggtgatgaatcttcagagcgaggtgagtctcctttctaaccttttaagagggaattgtctccttaggtgttctatatgctacatttaattgtttgttggggctacgtacgtaccaagtgactagagtccgtacgtagcgactactattattatgtctgggtagttaggccccacatcatgccctgtatacttcttgtaatgaattatatgtaataatatcctgttgtgtggttttgtttctctgagatttatcgattttaaattaatatggaaggaaattattttcacggaaaaatattatgaaatgtattaacttacgggaaggaatatgaaagaaattatttatggaaagtattatgaaagggaaaataatgacttataagttttgtactcatgtaagatattattgcttccccgagatttcatttacttatataattggaaaggattgtggtgaaatgaactttacattctgtgtgcgcatgttgtcgcttcgtaatttacatcccgcgagcgatatgtaatttccttcactcttatgggagcgggtcgtacgccacgacagatttatagtgcactcttggtatgggtcagtcgatccccggcagtgcgtaggcaggattactgttaagcatgcactcttggtacgggtcggtcaatccccagcagtgcatagttattctccctcatgactccagccggttctcctactcctgtgtgcgcatgactgtttggtacttttgttttccttatttatgatttgacagatgtttggggaaataagacaggtgagttgttacttctttcaatatttacttgggaactctgtattctcttcacaattgtggtgcactatttacatgtttactgctttccttatatcctgtttatttctatttactgttggaccttagtgagtaccgagtcgacctctcatcactacttcttcgagattagacgggatactcactgggtacatatatgtatatgtactcatactgcactttctgtgcattttgttgcacatgtacctttatagtacagtgattgatttggaagacttatacgggctgcattcatccagaggcgttccacagctgccggagtctcccttctgtgtacttacattttatatttattgcctttgtcaatttatttttcggacaagcgttgtataattgtataaattcttataaattgctcatggacttgtgtcatcgggttctggggatgtcttggtattttttttttgtattaagttggtttcttgccgtatttaaattatgaaatttatttagttattaatgaaaatgcaagaagaggctttgattcgaaaatgttaagcaggaagttgtttggactaattcaggggtcggcttgcctgacagaggtgtccgacgccatcacaacccataggttttgggtcgtgacaacgtggtattagagcactaggttcccttaggtttcacgagtcatgcgcaagtctagtagagtcttgcggatcagtacggagacgtctgtacttatcttcgagaggttacagggctgttaggagtacttcccttcttgattcctcatcgtgcgatttgattccattaagacgtatgcctatgtttcttcctactcaatcttatacgtcgctaagctcttgctatgattcgacgcttttaggaattgaaatggtgctacagatatggtgcgagatgttttccatgtgtagttggttggggctgttgttgctgccttgcagaagaataatatgttattttagctcagtaattgtgtttctaaggaccttgaggctatgatcaggttgttatgattcttacgattggatatcgtgcggtgttgataggatgatagggttctttcccatatgtaggggcaatgaatgacttgaagggaggtcttatcagggcgtggtttcgagatttcagttttaattctggcggaggaaaggcacttggactatgaatggtccagttcggattgataaagtagtaagcttggtgctatcgagaaaggtggagtattcacatgtgttgtggtatcgtcgtttgatcgaataggatatgttaaattcgtcggtgttatagctcttaggtcgcatggggttagagtgctgtgaagcggtgttgaagaagcggttgtcagagatcgtggtgtgtagtggttcagaattgaacagttacctctaatgaaggcagctcgagaaagatgatcttcggagagttcgaagttgtagtgatctgttggctcaaagagctacaaagagctacaaagaaggattttgaattaaggacgcaattgagaagcacacgataaagaaagatatgtgaaaagtgataggttgtggttccatttctaaaaggccaggcgtaaggaaaggaagtcgggtagtgcttaaaggaatgaggttaaccaaagtgggggagtcccaccacctgcagttgggttgtggggttgtgtcctcatggagttgcggattgtcggcatattggaaagttgttacaactaagggaaaggagtatagcggtaatggagcatggcattcgataaatgtgtgcgaagttggtcctattggaccagggttagactttggaagattaagaattcgtgcttaaggcataagcaagttgtaagggtagcgactcagtcacgtgctccgttgaaagggtgttcatgtgctaggagagccttggggttgattgtattcggggccagtcagagtgggtgactctcagtagtggtcctaatgaattcaaaagttagagaatgtggtgtttaacggtttcaggcaacggtataattaagaatcgagcttctgcagtataatctctaagaggaaggaagatggttggagtgttctatgttatttcagcacgctggatagtatcggaggagtgagggaaatagactccatgttgtagaaagattatcaggaggttgtgagacgggttgcgggatttaggcagcgtggtctcgtgaatcaaggtcactcgggatgagtgagggttgagctgctatgagttgaaggaagttactattatcttcgaggcaattaaagatgattaaaagaagccatgggtgaaatggcacaagtacgacagtgatcagttccttcggcatgtttaagtatttgtatggtctttgcaggtatgtgtggggctcgtcagccgtcgtaatagatttaagttggaaacattcaagtgctatggacggtcaggtgtaggcacgtcccggaagggttatggtggttcagaccactacttaagaatttgcatgtattgtgattgtgagagctcacttgtgtgttgttatagttctcatgaattgaagcaagtaaaaggtttctatatgtgatgaagtgatcaccctgttagtggctcaggagttatgatggaactttctatgctattccatattggcatgtgtatgtgcaataagctgtatgtaactggaagtaagaatcgagattgcggttcggtgttaacaaggatgtcatgatgcacggaggagcaagaccaaaagatttaaatgattagaataaactgatattgtcttcagtgtcatctgagttcggtgtttggtgaaagaggcttgtatccttgttacgggtccttgaattgttttacagccttaggatggtcggtggtatggatatgcatacttgttgccttgtatggaaagtcgtgggagtgtggccacgggaagattgtgtaagcgtgacttgtagtcacctgattgattgcagatttagactaagtataaggagtgtaatattgcttaattgagaatttatgcctggaaggcgttcggctcagttggttgtggattgtggggtgtttatctcggctacgatggttgtccttgtgggtataagaaaaaggaagcgggttgtttggaccgaggtaaggctatcagcctagttcaatgcgagcaggatcagcttgaagtgagtaaatggatttaaacaagattttgggcttcatgcgagtcaaaggtgtacatttcagggcactcctcgaggaggggtattgggatatcaggtgttgtcccgtctttgtcaaactcatgtgatattgtgattgtgtcgtgtgagttgtgaaacagcttgataatttcttatgtgttcaggttccgcgtagtgacgaggttatgtgagcaggatggctcctgagattcagattatatatcgcacctcagtcgtgatggagtgtttgtagcatatggctctatcagtctccccagaatggtattatgcacttagcgtgcttgtgaccgatattcagttatttttcatagtgagcaattgagcttcgtgtatattttcttatgtaaatcttatgatgggatcaggtggcacgccgccacgggtatgttatttggatcaggttgcacgccgcaacagtgtgatgttgagcaaggctcctataattattttcttgttttttacttcgtaatttctgaggaaagttcatattagttgcgtgagttgagtagtaccttccggagtcatttccttatgtgtcgtgttcgaattgtggcctattggcgcattgtggcatcgtgtgaggctaatggccttgtttcgggtgattggttgtctgagcagttcatactgggtgagacgaaatttataaatctgggatcggtgtgataagaccatgcaagtatattacaggacaatcaccatcatcggttgtaatgagatgatgatcttagtcaggataaaggatttcaatgtttagttaactctgcagttggttaggaatttctacacatttcctccgctgtggtggtatcgtcagcattataacaggatgtatgtgtgtatcttataaggtgctttgagagcatcaaattcgtagaattctggctattaaggttcatagagcgtcattgtggtcagatgatggatggtgctgattcagcaaggatacgcagttgtgttctgttgcctcgtgtggtagttgttgcggtgttcacatattagaaacaggcatgacagagaaatttcaagtgttggaactggggtctgagtttattatatgaataaaagggaataccgtcagatttttatcaagctaatgtgctcaactgggttgtggtagcacgggcacgtgcgcgaggtgttaaacagtgatttcagataattctagggcagttcttggcacgttcaaggatgaaagtctgtttaagtgggggagaatataacgacccgacctgtcgttttgagatccagcacgtcgttcagcagttgggagtcatgaacaacttcatttcgggtattgtgacttgtgtgtattgttagagttgaaattcaggaggttcggagttaaattgaaaggaaaattctcatttcagaagccttagttgaagaaattgagtaagattggaattttgagtaaatgacctcggaatcaggatctgaaggttccagcaggttcgtatggtgattttagacttgggcgtatgtccggattgggatttggataatccgatagcgtttcggtgtatattgtggaagtcagcatttttgaagaaatttcctaagtttggcttgaagtgcatttcaatgatattgatgtccgtttgggattttgagtttgggaatagctctgtatggtgattctggagttgggagcacgatcggaagtgaattcggatgtccgcaggtcattttgaagtctattggttaaagatagaaatttgaaggtttttgagaaatttgaccgagagtttgactttttgatatcggggtcggattcaaattcctaaagttggagcaggtccataaagtcgaatatgacttgtgtgcaaaatttgaggtcaatcggacgtgatttgataggtttcggcatcggatgtgaaagttggaattttcaaagttcataaagttgaattttagtgcgattcgtgattcggcgttgtttgatgtgttttaagcctctagcaagttcgtggggtgttatgggactgagtcgtgtgatttggacggggtcccgggggcctcgggtgtgtttcgaggtggtttcgggccatttttctctactttgttgttgttgtcatctgatgtttctggtgtgctgtgcgatcgcatcccttgtagtgcgatcgcggaggagaaaatgggaggggtgattttttggtttgtgcgatcgcggcctcagtggtgcgatcgcggagaaggatttggagggagctggaaaaaggcctgtacgatcgcaggcatgcttgtgcgatcgcatagaaaaaatgttatgctgcactgactcgacttcggaggctcatatctcacaatctataagaaattgtgagattatgtaaaaatgaaagttgtagtactttgtgtctagtttctagaaatgtaaaacatttagcatttggattattgtataaaaagatatggttgttacactacagggtgtctgggaagatgaagaacaaatttgtgttgcacagggctgactttggcagcttatatcttgaaatatataaggtattaggagatgaccaatacatgaaagttatagatctttaagtctagctttcagaaaatctaaacatttgtcatttggagttttatgcaaaatgttatgtttattctactagaggttgtccgggaggctgggcatttgttctccgcgatcgcgaagagcaaattttaggctggaaaattgtactccacgatcgcgaagctttttccgggatcgcactgagtaaatactaggaagaatgtttaaaaaacgggattttggccatttcatcaattccttccctgggttggggcgattattgaggattccaaagggttattttcatcaagcatcaagagctaagatattctacttttttccaagttaaatacaagattattacacggatttaacatgaaaattagttggaaaattgggaattttgaagaaaacctggaaatttggattttaaccacgaattgagaatgaataattgagtaaaatgtgtaattgaattagtaaagcttcgggtagggattttcttcaagaaattttgaggttcgggcacgtgggcctgagggcattttggtcatttcattgagtcgggctgaggaactttgtaatttgaattggttatgatctattgagtatattttcattgaattatcgttatttggatagtttgggagtgttgcgcatccattttagtcgtcgtagaggcttggaagtcggtgatgaatcttcggagcgaggtgagtctcctttctaaccttttaagagggaattgtccccttaggtattctatatgctacatttaattgtttgttggggctacgtacgtaccaagtgatgagagtccgtacgtagcggctactattgttatgtccgggtagttaggccccacatcatgccctgtatacttcttgtaatgaattatatgtatgttataatatcctgttgtgtggttttgtttctctgagatttatcgattttaaattaatatggaaggaaattattttcacggaaaaatattatgaaatgtattaacttacgggaaggaatatgaaagaaattatttatggaaagtattatgaatggagaaataatgacttataagttttgtactcatgtaagatattattgtttccccgagctttcatttacttaaataattggaaatgattgtggtgaaatgaactttacattatgtgtgtgcatgctgtcgcttcgtaatttacatcccgcgagcgacatgtaatttccttcactcttatgggagtgggccgtacgccacggcagatttatagtgcactcttggtatgggccggtcgatccccggcagtgcacagggatttaattaagaatgccctcttggtacgggccggtcgatccccggcagtgcgtaggcaggattactgttaagcatgcactcttggtacgggccggtcgatccccgacagtgcatagctattctccctcattgtgcgcatgactgtttggtacttttgttttcatgatttatgatttgacagatgtttggggaaatgagacaggtgatttgttactgctttcaatatttacttgggaactctgtattctcttcacaattgtggtgcactatttacatgtttatagctttccttatatcctgtttatttctatttactgtaggatcttagttagtaccgagtcgacctctcgtcactacttcttcgagattagacgggatactcactgggtacatatatgtatatgtactcatactgcactttctgtgcattttgttgcacaggtacctttatagtacaatgattgatttggaagacttatacgggctgcattcatccagaggcgttccacagctgccggagtctcccttttgtgtacttacattttatatttattgcctttgtccaatttgtttttcggacaagcgttgtataattgtataaattcttagaaattgctcatgaacttgtgtcatcaggttctggggatgtcttggtatttttttttttttttttttttttgtattaagttggtttcttaccgtatttaaattacgaaatttatttagttaataatgaaaatgcaagaagaggcttcgattcgaaaatgttaaagcaagaagttgtttggactagttcaggggccggcttgcctaacagtggtgtccggctctatcacaacccataggttttgggtcgtgacaatttacttatcaaaaccaccgctgctatcgaagccaagagaaggagaaagattatacatctacctggttctttcagaaattgtcgtaagtgcagtactggtaagggaagaaaaaggtaagcaatcccctatttattttgtaagcaagactctattagatgccgagactagatatccacatctagaaaaattagctttagatttaataatgacatcaagaaaattacgtccttatttgcaatgtcatccaatcactgtcgtgacttcatatctttaaggaaatattctgcacaaacaagaactttcaggaagattagccaaatgggcaatagagttaagtgagtatgatataacatatcaacctagaacggcaattaaatcgcaaatattagcagactttgtagctgactttagcaacaatattacccctgaagtggaaaaagagttacaactcttcaatggtgtaaacccaggtcaatggaccctatttacaaatcgctcttctaatgtaaaaagagctggattaggcattatactgacataacccatgggtgaaaagatacgacaagctattaagtgttatccaatcactaacaatgaagtagagtacgagcctgttattgcaggtttagaattggcacgggagctgtcaattcaacaaatcgagatcaacagtgattctcaattggtggtaaaccaaatgcaggggacttacatcgctcgagaaactcgaatgcaacaatatttagaaaaggcacgagaacttgtaagacagttcaaaacgtggaaaataatacaaatacccagggaggaaaatgctgaagcagacgcgttagcaaaccttgcggcagtcacagaagtgaccaataaagacaacaccattgtcatccacctctttcactcagtgattgaccaagacagaaatgaggtatcttttaataatttaacttgggattggagtaacgaaattctcaatttcttgcagagtggtaccgtgcctgaagacaagaaagcagatcaagcgcttcgtcgcaaagcagcaagatattgtcttgtacataacatggtgtatcggaaaatcttcgggggacccctacctaaatgcctcagacctaatcggacggagatagattatacatctacctggttgtttcagaaattgccgtaagtgcagtactggtaagggaagaaaaaggtaagcaatcccctatttattttgtaagcaagactctattagatgccgagactagatatccacatctagaaaaattagctttagctttaataatgacatcaagaaaattacgtccttatgtgcaatgtcatccaatcactatcgtgacttcatatcctttaggaaatattctgcacaaacaaaaactgtcaggaagattagccaaatgggcaatagagttaagtgagcatgatataacatatcaacctagaacggcaattaaatcgcaaatattttatgataggtccgaggcatttagctaggggtccgaactgactggctaaagactgaacatccaaggctaagggcctatcaactaccgaaaggtatgccaaactccccaaactctccgcctggcgactcaaggcatcagccaccacattggccttccatgggtggtaaaatatggtgatgtcgtagtcctttaataactccaaacacctccgttggcacaaattaaggtccttctgcttgaacaagtgctgcaaactccggtgatccgtgaaaatctcaaagggaacaccgtataaataatgacgccataccttcagggcatgaacaatcgctgccaacgaggtcatgaactggatagttcttctcattcaccttcaactgtctggacgcgtaggcaatcaccctactgttctgcatcaataccgctccaaggccaatcctcgaggcatcacaataaattgtataggatcttgagcaggcaaaaccaacactggagatgtagtcaaggctgtcttgagcttctgaaagctctcctcacactccttagtccacctgaacggagaacccttctggctgttggggcattggtcaacccaaatgacatgacaagcaactcatagtggccatatctggtcctgaaggtagtcttcgggatattcggctcccgaatcttcaactaatgatagccagaacgcaagtcaagcttagaaaatacactggcaccctgtagctggtcaaataaatcatcaatgcgaggcaataggtacttgttcttcactttaaccttgttgaactgccgataatcaatacacttacgcatagaacaatcctttttcttcacaaataataccggagcaccccaaggtgatacactaggcctgatgaaacccttatcaagcagctcctgcaactgctccttcaactccttcaactcaggaggatccatgcgatagggaggaatggaaatgggctgagtgcccggcaacaaatcaatgctgaaatcgatttctctgtcaggcggcatacctggaagatcagctggaaaaacatcagatagtccctcacaactggaactgactcaactgtaggaacactaacatatctcacataggccaactacgcatcacatcccttctcaaccatccgttgagccttaagaaataaaatgactatgcggggaatatactttaaggtacctctccactctaatcttggtaaacctggcatagccaacgtcacggtcttagtgtgacaatcaagaatggcataatagggcattaaccagtccatgcccaagataacctcgaaatctaccatatcgagtaataacgaatcatccctggtctcaaaaccattgataacaatcaaacacgaccgatatacgtggtccacaacaagagaatctcccacgggagtagaaacataaacaggggagctcaaagaatcccgagctatccctagatgtgaggcaaaataagaagacatatatgaatacatagagcctgtataaaataatacggatgcatccctatgaaaaacaaggacaatacatgtgatggccgaatctgaaacgacgacctctaaacgggctggaagacaatagtaccttgcctgacctccccctctagggcaacctcgacctcccccacctccacctcgagctgtctgagagcgtgtgcaacccgggcggatagccaggaggactttatgagaaaaactgagaaaatgctagcttttgccttaaaattttgatttaagttgacttcagtcaacattttgggtaaaaggacctagacctaagatttgacggtctcgaagagtccgtaggaaaatatgggacttgggcgtatgcccggaatcgaattccgaggtcccaggcccgagaaatgaatttttgaaagaaattgttttctgaaaatataaagaattctagaaattttatcatgtttgaaatctatggtatcgggcccgtattttggttccggatcctattacaggttcaatatgataattatgatatgtctataaaatttggtaagaaacggaagtcgtttgacgtgattcggacccgtagttgtaaaatttgatactttagaagttttggaaattttctttgattttgatgctaaattcattgtttaagatgtaattttggcgatttgataggatgagtaagtccataggatatttttgaggttgtgtacatgtttggtttggatccccaagggctcgtatgagttccagataggcgtcggggtgattttacttggaaatatctggtgtttggactgttttctggtgtttgaacttttgtactatgcgaacgcatagcacatgattgggagggggttggttaactctgtgcgatcacatacgaccagttgcgaacgcggagcacaggaattttgttctacgccaacgcacactggaggccgcgaacacataacattagaggggctgggggatgggaagattttattcagtgcgaacgcaccattgggatgcgaacgcgtagggtggggtagggcaacctatgcgtacgcattatcttggtcgcgaacgcatagggcaaaattttgcccagttttcttaaaacagtagcattacaggattttatcaataattcataacttcttcacctaaactcaaaatttggcgatttttgaaagggaactttaccacaaaatcataggtatgtattcttagactcgtattcttcaaattccattaacacccattagatttctaagcctaaatcatgttcttaagggtagaaaattaggaatttgggcagagttagggctttttgaataattagaatttagacctcgttttggggtaggattctagaactaattacatatttgggctcgtgggtgatgtcgtgtattgattattgtgaggaagagtgtaaagcacgaagggagatgccgtgtattgattattgtgaggacgagagtgtaaaagcacgaagggtgatgccatgtcatattatgatattaaaagcacgaagggtgatgtcgtgttgtttctcagtacatggggtcggttgtactgatgctacactctgcacatatttgttgtgcagatcgcggtacaggaccctacggacattagatcgaggaggctgccttcagtccacgtggagacaccgaggttgtcctgttggcgtccgcaggccttggcgtcccctcatatttcctttgtcttctgttctagttgtcttataaacatatatacttatttcattcggacttttatatgtattactcttagactttccgtgagttgtgactccaatattctgggatgtggtttagtttttgtgaaatttcgtaaaggcattgtattggattatatatcttgcttcatcttatatttttattcatgctaatgtggtaattcacctgtttacgactattaataaaggaataaagtaaattgaacattcacattggcttgcctagtgggttcaacgttaggcgccatcacggtcccgccggtgggaaattcgggttgtgacaagttggtatcggagccctaggttgcttaggtatcacaattcacgaacaagcttggtagagtctgagggattggtacggagatgtatgtacttatccaccagaggctgcagagtttaggaatatcttcacatctattcttttgtgtcgtgcgatttgaattctaaatgctaattgaatttctattctattctctcgtagatggtgagaacacgtgcttcttcatctactgatcagtagcccgaggctccagttgcagttcctactaggggccgaggacgaggacgatgccgtgctagaggctgcggcaggggcagcgctcagcccagagcagcagccccagtggcggagcctcaggtagagtttgccgatgaggttcctgctcagacagttcagtcggaccagctcaggttcccgaggggttcattgccaccccagtactctaggatgctctggtccatttagtgggccttatggagagcgttgctcaggcaggtctacttcctgcagcaccatccatctctgaggctgggggaggatccagactcctgccacccgcacaccaaagcagttagcttctcagttctattctccggcacctcaaacaactggggtagtccagccaggtattgtggcccaggcaggggagggagaagctatgactgccgatgctttatggagattggacttcctaccacttttagtggtgcaccttcaaaggatccccaggattacttagacagttgctatgaggttcttcggaacatcgggatcgtggagaccaatggggtcaattttgctactttctgcctttcaggttccgccaagacttggtggagggattattgcttgaccagaccggctggatcaccacctttgtcttgggctcagttctccgatttgttcttggagaagtttcttcctgttacctagagagaggatttccggaggaagtttcagcatcttcagcagggttctatgacagttacacagtatgagaccaggttcatcactttagaccgacatgctatcatgatactccccaccgaccgagagagggtaaggaggtttattgaggagctagctcagccgattagacttcagatggccagagagacagggagtgatatttcctttcaagaggcagccaatgtggccacacgaatcgagatgctattattgcagggcagtggtcaggggtcaggggtctgataagaggcctcgtcattttggttggttcagtggtgcctcatttggaggcagggattcttttggcagaggtcatcctcctagaccatttcagtcagcacttcaggtttctcgcagttttccaagcagtcgtggttcccacatgccatattctgatcagttggcctatagtgcaccatcaactcctattagtgcaccgccgctctagagttttcagagtggctactcaggtcgacagggacagtttcagggccagcagcctcaacagcagagatcttgttatacttgtggtggctcggggtacattgttagattctgcccccgagcctcgagtggttctcagcaccagggttcccgtgttatgattctcgcaccaggagctccaccaccccctcaaccagctaggggtgaaggtcgaggttccataggtggaggccagacaattagaggtggaggtcagtctattagaggtagaggccagccagcagcaagtcggcccatggatgttcagattggtagggcacagccccgatattatgttattcccccccaggccagaggctgaggcctctgatgcagtcattacaggtatggtttcaattttcagcagggatgctttgattttgtttgatccgggatccacattctcctatgtgtcatcatatttttctccttgtttgattatgcctcgtgattctctaagtactcatgtaccggtaggtgattctattgtggtagatcatgtctaccgttcgtgtgtagtggttattggtggtcttgagacatgtagatcttctactccttgatatggttgatttcaatgtcattttggggatggattggttgtcgccctatcatgctattctagactgtcatgccaagaccgtgacattagcactgtcggggtttcctcgactagagtggagagggactcctggtcattcttccagcagggttatctcatatatgaaggctcggcgcatggtcgagaagggtgtttagcctatttggcttatgttcgtgattctagtgccgaggttccttctatagagtctgtgcccattgtccatgagtttcttgaggtgtttcttaaagacttgtcgggtatgccacccgacggggatattgacttttgcattgagttggttccgggcactcagccgatttctattccgccatatcgtatggccccgcctgagttgaaggaacagttgtaagatttgcttgataaaggctttattaggcctagtgtttcgccttggggtgcgtcggtgttgtttgtgaagaagaaagatgggtcgatgaggatgtgcattgattaccggcaattcaacaaggttactatcaagaacaagtatccattgccgaagactgatgatttgtttgatcagcttcagggtgccaaggtattttcaaagattggtttgagatatggctaccatcagttacggattagggcctctgatgtccctaagacagcctttcgcactcggtacgggcattatgagttcttaatgatgtcattcgggttgacaaatgccccagcttcttttatggatttgatgaaccgagtgtccaggccttatttggatttgtttgtgattgtcttcattgatgatattttgatttagtcccgcagtcgggaggagcacgagcaacaccttcgagtcgttctcagaactctgagggacagtcagttatgtgctaagttttccaagtgtgagttctggttgagctcggttgcattcttgggtcatgttgtatcagcagagggtattcaggtagatcccaagaagatttcagcagttaaggattggcctagaccccacatcagctatagagattcagagcttcttgggcttagcaggttactatcgccagtgtgtggagggcttttcacctattgcagccccgataacacggttgactcagaagggtgcccagttcaggtggtcagatgagcgtgcacttttagaagctcaaggcatccttgaccacggcaccggtgttggttttgccctcaggttcagggccatatactgtgtattgtgatgcttctcgggttggacttggtgtagtgttgatgcaggatggcaagtttatagcatatgcctcacgtcagttgaaggctcatgagaagaagtatccagttcatgatttagagttagcagccattgtccacgcgctaaagatttagaggcattatttgtatggcgtgtcatgtgaggtgttcacggatcataacagtttgcaatatctgttcaagcagaaagagttgaatatgaggcagagaagatggttggagctgttgaaagactatgacattaccatcttatatcatcgggggaaggccaatgtggtggccgatgccttgagccggaagtcagtcagcatgggtagtcttgcttatattccggtcggggagcaaccgctttctttggatgttcaggctttagccaatcggttcatgagattggatgttttttagaccggtagtgtcctagcttatactgtggcttgttcttcattattcgaccgtattcgggatcggcagtatgatgatcttcatttgcgtgcccttagggacacggttcggcatggaggtgccaagcaggtttcagttggtgatgatggagtcttgcggatgcagggccgtatttgtgttcctaatgttgatggacttcgtgagttgatattgcaggaggcccatagttcccgatattccattcatccgggcgccgcaaatatgtatcaggatttacggcaatattattggtggagaaagatgaagaaagatatcgtggcatatgtagctcggtgcttgaactgtcatcaggttaagtacgagcaccagagacccgatggattgatgaagcggattgagattcctgagtggaagtgggagcgtgtcaccatggatttcgtagttggactcccactaactcagaggaagttcgatgcagtatgggtcattgtggataggctgaccaagtcagcacatttcatccctgtggcagtttcctattcttcggagaggttagcagggatctacatcagggagattgttcgccttcacggtgttcccgtgtccattatttcttaccgaggtacgcagtttacctcacatttctagagagtatttcagcatgagttgggcacacgagttaagttgagcacaacgtttcatcctcagacggacggacaatccgagcgtaccattaagattttagaggatttgttgcgagcatgtgtcatttattttggaggttcttgggactagttcttgcccttagctgagtttgcctacaacaacagttaccagtcgagcattcagatggctccttatgaggcgttgtatggtaggtggtatcggtcgccggttgggtggtttgagccgggggagcctcaattgttgggttcagagttagtgcaggatgccttggacaagtttaagatcattccggatagacttcatatagctcagtccaggaagaagcgttatgccgaccgtagagttcgtgatttggcgttcatggtcatagagcgggtattgcttcgggtgtcgcccatgaagggcgtgatgaggttcggaaagaagggcaagttgagccctaggtacattggtccgtttgagatccttgatagagtgggagaggtggcctacaggcttgccttgccaccgagtttatcagccgtgcatccagtgttacatgtatctatgcttcggaagtatcccggcgatccatcccttgttttatacttcagcagtgtctagttggacaaggatttgacctatgaggaggagccagtagccatattagaccggcagattcatcagttgagatcgaagagttatccttcggttcgtgtccagtggagaggtcatcctgccgaggcagctacctgggagtccgagtccaatatgcgaagccgatatccccatctttaccccaattcaggtactactctatgttcgttcgaggacgaacgtttgttttagaggtggagattgtgatgacccaaaatgtcatcctgtgttttataagtcaaaacggtgtcctgaggctttgaaaacctccttttatctcacctcgatttgcgtgtgcagtccgggcggatagccgagaagcctttatgtgaaaactgagaaaatgctaacttttgccttaaaattttgatttaagttgacttcgatcatcattttgggttaacggtcccggagagtccgtaggaaaatatgggacttgggcgtatgcccggaatcaaattttgaggtcccaagcccgagaaatgaatttttgaaagaaattatttttctcaaaatataaaggattctagaaattttatcatgtttgaaatctatggtatcgagcccgtattttggtttcggggcccggtacaggttcaatatgataattatgatatgtctgtaaaatttggtaagaaacggaagttgtttgacgtgattcagacccgtagttgtaaaatttgatactttagaagtttttggaaattttctttgattttgatgctaaattcattgtttaagatgttattttgacgatttgatagcacgagtaagttcgtaggatgttttggaggttgtgtacatgtttggtttggagccccaagggctcaggtgagtttcggataggcgtcggggtaattatacttggaaaaatctggtgtttggactgttttctggtgtctgaacttttgtactatgcgaacgcatggatatccatgcgaacacccaacacaggatttggagggggttggttaactctgtgcgatcgcatacgaccaggtgcgaacgcggagcataggaattttgctctacgcgaacacacactggaggtcgcgaacacatagcaatagagaggggctgggggctgggtagattttattcagtgcgaacgcacccttgggatgcgaacgcgtagggtggggtagggcagactatgcgaacgcattagcttggtcgcgaacgcatagggcaaaattttgccatgttttcttaaaacagtagcattatgggattttatcaaaaattcataacttcttcacctaaactcaaaatttggcgattgttgaaagggaacttcaccacaaaatcataggtatgtattcttagactcgttttcttcaaattccattaacacccattagatttctaggcctaactcatgttcttaagggtagacaattacggatttgggtagagttagggatttttgaataatgtgaattagacctcgttttggggtggtattccggaactaattacatattcgggctcgtgggtgattgtgtgatcgggtgtttgtccgaacctcgtgttttgaccaagcaggcccgaggtcgatttttgacttttcgggaaaactgctagaaaacctataattaagcatgggaattgaattgcttagcgtttattgatgttattaagtcaattatgtctagatacaattgatttggagttaaattcaaaagggaaatcggtgattgatgcttgatttttgtcatggaagtcgaggtaagtgtttgacctaaccttagcttgagggaataggtgttgagtcttatttgctatgtgttaataccatgttcaacgtataggtgaggtgacgagtacctatacattggtgtcaagcatgcccatgagtcggatattatgaattatgtggatttcattgatatttactgtgttatagcttgaagtttactttgtggttgttcattttggtggaaattcttggtaatgaatattgttgagtattggtttcggttgagaaattttatgtgaagatatgtacttgagtgagattccttatagttgtttcccttgccgggatggtgatatttccattgttgttcccttgccgggatgttatgatttattattatggttcatattgttggtttttccttaccaaacttctgttattgatattgtttgggtgaggaagagtgtaaagcacgaagggtgatgccgtgtattgactattgtgaggaagagtgtaaagcacgaagggtgatgttgtgtattgattattgtgaggaagagtgtaaagcacgaagggagatgttgtgtattgattattgtgagtacgagagtgtaaaagcacgaagggtgatgccatgccatattatgatattaaaagcacgaagggtgatgccgtgtcgtttttatttattattgtgaggatgagagtaaaagcacgaagggtgatgtcattctcttgcatttattatttggtgaggatgagagtaaagcacgaagggtgatgtcgtgcactgtcttctctgtgatgttatttcctattgtttaagttgatattgaattgttgtcttatctcattatttccttcatttgatatttctttcccccagcatgttccctcctttccttggtacttagttgtttacttgctgttattattattcctccgaatattattaattgcacatgttgttctggttgtcgtgtcctagcctcgtcactacttcgccgatattaggctcaacacttactcagtacatggggtcggttgtactgatgctacactctgcacatatttgttgtgcagatcccggtacaggaccctacggacattagatcgaggaggatgccttcagtccacgtggagacaccgaggttgtcctgttggcgtccgcaggccttggcgtcccctcctatttcctttgtcttctgttctagttgtctcagaaacagatgaacttatttcattcggacttttatatgtactactcttagattgtctgtgagttgtgactccaatattctgggatgtggtttagtttttgtgaaatttcgtaaaggcattgtattggattatatatcttgcttcatcttatatttttattcatgctaatgtggtaattcacctgtttatgactattaataacggaataaagtaaatcgaacattcacgttgacttgtctagtgggttcaacgttaggcgccatcacggtcccgacggtgggaaattcgggttgtgacatcttgggatgtcaacatgcactcccttactcctctcattcttttctctctcatgttttttcatattctctttaatagtcttttcgtcttcacaaatttgcgagggagtcaaaggcccaagaatgagtttcttcccgttaacctcaaaagagtatctatttttttccatgttatatgaagctcttctgtagacataccatggctttcccaacaagatatgataattattcatgggaatcacatcacaccagattgcattcttatgcctttcaatagagaatagtaatagcattcttttatccacctttactcctctcaacatgtagggttcaatatgctcaacacaaggtaagttcaattttcaaccatataaatgctaattgagttatagccatattctttgtcaattctaagggaacaaatcgcagacatcactttagctcttgtctgaagaataactttaccattgtcttccttccattcggtatactgtaagttcgactttttaagttgttgagtcatagctcacctcctttcactataagtacctgcttgaaacatctagaacaaagattagaataattatgtatctctcaaatttggctttttccttctagttgtctcacctctcttgccttttttcactcaaagcaactcttggttgttaatctttagatttattaataaacctagcaagtcacaacccatattgataagaataaggagttagaaggaaaaaaaaaggaaagtggaggaccaaacctaggaagaatagaaattggttagtagtaaagaaaagaaagaattgagaaacccaaaactcacaagaataaggaaaggagttaccttaatcttcaagaactaggatattcccttcttgtttcctttcttcactttgaaaccaaacaatacttgaattataaataataatgagctaaccctgtttttcgctgatttttttttttgttcaagaacctcccaagattatcaagattgaaatcttgattagactatgctctgatatcacttgataacaacatgatagggttccaagaattactaaagaaaaattaagaaacgtgcggaaactaaaagaaaaaaaaagaaggaaaattaaagatagattgaattcaagaaagagtttcttgaattcaagaaatctattcttgaagttgaatcctaacaacaacaattagctaacaaagaactaatcgccttaggtagagatttaaaaataagagatagattgttaaactcaaccctttagaataacaagaacaacaataagcctaaacttatcacctttcatgaagacctagaagtgatctaagatttcgaaagaatctaatcttaacaccttaagttgagtcttgacggttgaagaacaaattcaagagtagccacacacaacagtgcaagaaaaatctcacaatttttattaataataatctataataatatccctaaaaataaagaatacacccctttatatagagtggggtcacgaaattccacctaaaaataaggaaataaagtcctaaattactttggacaacaagtccaactaccttaggaaaaggaaaatactaggaagcaaaaaccaagtcattggaaattaattccaaaaatcttagtaaaagtaaaacataaccttaactaactaggaaagcaataaaatagtcccataatatgtggaaataagtcccaaaccaatcttggatagaatcttgaaaattttggagatcttggaggaaatttgcaagcaacatggcaccaacttgcgctcaacatctattgtaccattcttggaaatcaagtaagtcttttttatgatataaaaatgtgactttatgtaggacttcatgggctgcaagtttggaaatattttacgtaccaaattggtccaacagtggcttgattttgaccttcttcagaggatgtttcttgggatctaatccaccttttcttggacatgaatttgggccataaaataattataacacctaaataactcatatcatttatacttaagttcttcctcccaactaacaacttctttgatcactcttgaagtccaatgaccttgttttgcaactttttagcttgagatcttgttaaaggccctctttcagattccaaaacttcatccttgtccttgaatatatccttgaaaaataactttaccattgtcttccttccatttggtatactgtaagttcgccttttcaagttactgagtcataactcgcttcctttcactataactacctgtttgagacatcttgaagaaagattattagaattatgtatctctcaaatttagctttttccttctaatactctctcacctctcttgcctttttccactcaaataaactcttgattgttaatctttaaatttattaataaaccaaacaagtcacaaccagactgataaggataaggagttagaagaagaaaaggaaagtgggagaccaaacctagaaagaataggaattgtttagtgttaaaagaaaaaagaaagaatttaagaaaccaaaacacacaagaataaggaaagaactaggatcccctcttcctgtttcctttcttgacttggaaaccaataatactttaattctgaaactaataatgagcaataacactttttgttttggctaattttcgtttttttgttggttttttttttttggggggggggggggtatttggttttttttcctcaagaacctcccaaattatcaagattgaaatcttgattagactatgctctaataccacttgataacaatacgataggggtcaaagaattgctaaagaaaatcaagaaacatgcggaagctaaaagaaaataaagaaacaaaaaaaaagacgaaaaattaaagataaattgaattcaagaaagagtttcttgaattcaagaagtctattcttgaagttgaatcctaacaacaacaattagctaacgaagaactaatcgcctttggtagagacttaaaaacaagagatagattgtgaaacccgaccctttagaataacaagaacagcaataaacctaaacttatcacctttcttgaataactagaagtgatctatgatttcgaaaaggggttaatcttaccgccttaagtttagtcttgaaggttgaagaataaatccaagagtagtagagtgcaagaaaattctcacaatttttattgatattgtctatcataatctatgtctaaaaacaaataatacacccctttatatagatagggatcacgaaattctacctaaaaataatgaaataaagtcctaaactactttggacaacaaatccaactaccttaggaaaaggaaaatactaggaagcaaaaatcaagtcattcttggaaagtaattccaactatgtcacgacccgcatccaggttgtgatggcgcctgtcgtggaaccaggctagccaaccgttacaacaatactcaattcatttactagagaaatttactcatttttggctcaactcatagaaatacggaaatttttaatcagttaaaaacagtctaacagaagaaataagctccaacaatcaatctaggatctggagtcacgcagtcatgagctactaacatcaatacaactgagaaataatactaaagttttaagtttccaatttctaatacaagaggaaaaatgaggaaaagagggacgggacagtgaacgccagctgctacctcgtcggctctgagagataagctgctatcaccgatccgcgccaaatctcggtgcacctggatctgcacatacagtgtgcaagtaagtaacgaaaacaacctacggtctgaggaggtagtgatgaactcaacctccgtaaataacaattcgaataatgaatgtttcagaaataaccgagaatatcagtgacaatcatgttatataaatgaccctagaacttagtcacaatccgtgaataacaaataaatgccatgtatgtagcatgcaactctcacaggtggtcctctcggtacacataattggccattggcctagggaaatccatcacgtaacatgtacgacgtggtgactcagtcactaagtaccgagggagcaggccaattcagcctttcagagaaatccatctcccggatatcatactcatccataatctgtaccagggaaatatccctccatctctcataaacagtatctgtgccagggaaatccatccctctatatctcatatctcggacaaatccatgtccagggaaatccatccctcaataattgtgcgctcactgggggtgtaaagactccggaggggccgccaagggtatggcccaagcgctatatatatatatatatatatatatatatatatatatatcaagcccgcgaagggtatatcatctcaacattcggctctaggcccatactcagtcagaattactagtctcctcacaactctctcattatgtaaacagcccaaacaatggcaatgcatgatagataaatgatttctgagactgaaatacgaatacatgtataataacaggactgagtatgcataagtaaaattcgcaatagatacaatagtgacggaccctttccggtctccacatatagacatgaagtcttatcatttatacttgttatgtttcttttagtttctacgcattaatagcattcacagtaccgatatcatggtggaacaacagttaaaccgtgcctggggataagccgggccacaaaaaaatcaaccaacactcatatgcgcgtcacttggcgagtgtatcatagtaactatcatcaattagcatgtacattgggattttgaacccctcagttccaaggttgaagccgttacttacctcgaaactggctcaactctactccaccgggccctttcttgagaatcggcctccaaatgctccaaatctatcaataatcaattacatagtgtcacaatgtgctaaggagcaatccccaaatcaaaatttagcaaaaataccaaaaatcccgaattcggtcaaaacccggccctcgggcccacgtctcgaaagttagaaattttcacaacactaggttcctggtcctttcccgagtctaaccataccaagaacacgaaaatcggacctcaaatggtcctccaattcccccattcttcttctcttaaacccaagccctaaccaccatttttctactgtttttaccaaagatttcaacctaaaatcgttcttaatgcacaatataatgagttttgagtccaagaaacttacctccttgaagaaacaacgaaatccctcttcaaaaccccttcaaaacctccaacccgtgtgtaaaaatggtgaaagaagacaaatttcgcgaaggctgccttttatagttctgcccaggcatctccgcaacagcggtgtttttctcgcacctacgactccgcaggtgcgacctttcaaccgcacctgcgaaacccacttaagttgcctagcttccgcacccgcgatacttttcccatgcctgcgacatcgcaggtgcggacatccatccgcctttgcgacctccttcgcacctgcgacctctttatcgcaacagcgggcccgcaggggcgacatattgaccgcaccagcggtccttcacttaacacctagagtccgcgccagcgaccccatctcccgcacctgcgacctcgcaggtgcgatcttccttccgcccctgcaacaaatttctgcccctgcgcctgcgatgtccgcacctacggcccaagcatcgcaggtgcggtcgcaccagcaacagcagcttcagctgcatttcaagttccaacttctccatttaacacccgaaatccaacccgagcccctcgggaccccaaccaaacataccaagatatcaaacatggttattcaaactttgtcgagctattaaaacaccaaaaacgacatcaaaaccataaattctcatccaattcaagcctatgatttccaaaaacttccgaaacacgcatttgatcaaaaacccaaccaaaccatctccgaatgacctgaaattttgcgggcaagtccaaactgatctaacgaagctacagaaactctcggaatcccattccgaccctcggataaaatctcgcctatcaaccggaattcgccaaaatactaacttcgccaattcaagcatatttctacaccgggcaccctaacaatattcttaacacactcctaagtcccaaattacctaacaaagatatccgaaccataaaatctgcattccgaggtcctttaccaaaaagtcaactccgggttgacttttccaactctaaagctcttgttagagactaagtgtctcaatccactctattttcactccgaacccgaaccaaccaaccccaacacttcatgaacagtctaaccaagctgctacaatacagaaataaagaaatagatgcgtatactgcgtaacgacggaccgggtcgttacattctccccctcttaaataaccgttcgttctcagacgggtctagaaacatacctggagtctcaaacaagtgaggatatctgctccgcatctcctgctcggtctcccaggtggcctcctccactggctgacctctccactgaaccttcattgatgctatctcctttgatctcaactttctgacctcacgagccaaaatagccaccggctccaccttataagacatatccccctcaagctgaactgtgttgtagtctatcacatgagacggatcaccaacatacttccggagcatcgatacatggaacactgaatgaacactcgataacctaggtggtaaggcaagtctatcggctacttcccccaccttcttaagcacctcaaacaggccgatataccggggactaagctttcccctcttcccgaacctcataacacccttcatgggtgacaccttcagcagaaccttatcaccctccatgaaagacaagtcccgaactctccgatctgcatagtttcttctgtctggactgagctgtgcgaagtcgctcctggatcaactttaccttctctaacgcatcctgaaccaagtctgggcttaacaacctagcctcgccgggctcgaaccaaccaaccggagatctacacctcctaccatataaagcctcatacagggccatctgaatactggactggtagctattattgtatgcaaactccgccaaaggcagaaaccgatcccacggaccaccgaaatcaatcacacaagcacgcaacatgtcctccaagatctggatagtcctctccgactggccgtcggtctgtgggtgaaatgatgtactcgtctctacctgcgtgcccatacccctctataaagacctccaaaactgagacaaaaactgagtacccctatcggatatgatggaaactggaaccccatgcaatctaaaaatctccctgatgtaaatatccgctaacttctctgaagtataagtagtactgctggaatgaagtgtgccgacttggtcagtcaatctactatgacccaaatagcatcaaatcccttcaaagtccgtggaagcccaactacgaagtccatggtaatccgctcccacttccacactagaatagccatctcctgaagcaatccacctggcctctggtgctcatacttgacctgctgacagttaaaacaccgagccacatatcccacaatatctttcttcatcctcctccaccaatactgttgtctcaaatcttgatacatcttcgcggcacccggatggatggaataccgcaaactatgagcctctaccaatatcagttctcgaataccatctacatcgggtacataaatgcgaccctgcatcctcataaccccgtcatcatcaatagtcacatccctggcatcaccctgtcgaaccttgtcccgaaggactgacaaattactatcatcatactggtgtgctctaatctgatcatataaagaagacttggaagccatactcgctaacacccgtgggggttctaacaaatccaatctcaccaactatcccgctaaggcctggacatcccgtgctaaaggtcgcttcgctgctgagagataagctaaactccctagactcactgctcggtgacttagagcatcggccaccacattggcctttcctggatgatacaaaatggtaaggtcataatccttaagaagttccaaccatcttctctggcgcaaattcaaatctttctgcctcagcaggtactgcaaactgcggtggtcagtatagatctcacactgaactccgtataaataatggcgccaaattttcaaggcgtgaacaatggcagctaacttaagatcgtgcactggatagtttttctcgtttaccttcaactgcctggacgcgtaggcaatcaccctaccgttctgcatcaaaaccgctcccaacccaactctggaagcatcacaatagactgtgtaggaacctgaaccagtgggcaatactaataccggagccgtagtcaaagcagacttgagcttctgaaagctctcctcgcactcatcagaccatctgaatagggcacccttttgggtcaatttggtcatatgcgaagctatcgaagaaaacccctccacaaaacgacggtagtaacccgccaaaccaaggaaactcctgatctctgtggccaaggatggtctgggccaactctgcaccgcctcaatcttcttcgggtccacctgaataccctcactagacaccatgtgacccagaaaagccactgaactgagccaaaactcacacttggagaattttgcgtaaagcttctcctccctcaacctctgtaacacaaccctcaagtgctgggcatgctcctcttggctacgagaatacaccaggttatcgtcaataaacacaatgacaaatgaatagaggtagggctgaaacacactgttcatcaaatgcatgaacgcagccggggcattggtcaacccaaaagacataaccaagaactcatagtgaccatatcttgtcctgaaggcagtcttcaaaatatcagaattccgaatcttcaactggtgatatatggatctcaaatcaatcttggagaataccttagctccctggagctgatcaaacaaatcatcaatgcgaggcaaaggataccggtttttcactgtaaccttattcaactgcctagagtcaatgcacatacgcatggatccgtccttcttcttcacaaataacaccggtgcaccccaaggtgacaaactaggccgaatgaaccctttgtcaagaagctcctgaatctggtcttttaattccttcaactctgctggggccatacgataaggtggaatagagataggctgggtatcaggtaacaaatcaataccaaactcaatgtccatgtggcatgcctgacaagtctgcgggaaacacatctgggaactcacggaccactggaacagtatcaatagaaggagtctcactgctcacatccctcacaaaggctagatacgactcacaccccttcccaaccatatgctgggccttcaaataagaaattaccctactaggcacatactccaccgaacccctccactcaatcctcggaaagcctggcatagctaaagtcacggtcttagcgtgacaatcaagaacagtgtggcacggggatagccaatccatgcccaatatcacatcaaagtccaccatagtaagcaacaatagatccactcgagtatccagacactcaatagaaataacacaagatcggtatacccgatctaccacaaccgtatcccccacaggagtcgacacatgaatagccgaaatcaaggactcacggggtatacccaaagaaggtgaaaaatatgatgaaacatacgaataagtggagtgatcactgcatctgaagcaatagcatttggcctggccggaagtgtagacaagctggtcctccaccggatcgacctccccctctggggcgacctctaactgcctgacccccacccctagctgcctgagcgggtggtgcacaagctgatgtcgaagctggaggctgacccctcggctgataagagatgctagcaagatgggggcaaaacctcttaacatggcctggatccccacactcaaaacaacctctacccacgactgacggcgaggactgaagggaacccctggaaccggagtagctgctggaagaaccatgtcctgaggaaccataaaaggacggtggcctgggtgaactcagagctggaagggcactaaatgatgaacggcccgaatgagaaccatgaaacccctgtcctgaagagatcccactatgcactggacgggctggctgaggaggcctgaatgaacggcctctgataggctgagaagaaccaccagaatgaaatccactataagtaccagatccacgaggtctcttggcctccctctcctcatgctcctggcgtcggatagactcaatgtctctggcgatgtccacaactgtctcaaaagaaaccccagacactctctctttggtcagaagaagccgcaactgatggttaagaccatcaacaaatctctgaatcctctccctgtccgtaggaaccaaccagacagcatgacgagctaactcagaaaacctcatctcatgtcgcgtcacagtcatatccccctgacgcagctgctcaaactctctgcgcagctcctctctctgagactgtggtacatacttctctaagaagagaatagaaaactggtgccaagtaagtggtggtgtaccggcgggtatgcgcctctcataggccttccaccaagcaagtgccgatctcgagaactggaaagtggtaaatggaactccgctagtctcgagtatcccagcggtacgaagaatcctctggcacttgtccaagaaagcctgggcatcctcaccctcagtgccactgaaaatagggggctggagtctgctgaatctctccagtctccgctgctcatcatctgccaaggcagggaccacgaaatctgatgcggcagcaacgagctggactggggctactcctggtgtttgaagcccccaaagaaccttctcaggagtctgggcaactggagcctgtatgcctcccccggcctgagatgtggtagcagaagaagatagagcgaccgcctgtgctaagctggtacacactgtcagaatctgagtcaaggtctcctgaagacctaggatcactataggcacagctggtgtcgggtcctgccccgcaggaacctcgactgtgggggcctgatcctgagcaatgggaggatcctcaggtgctgccccacgtaccggacgggctgcaccccttcccctagcctgacctcaaccacgacgacctcggccttgaactggtcccgctggtgccgggtcatcactgccggtagcatgagtcctcaccatctgtgagaggattaaacaatgagagtttagttccaagaatcaacagagtcgcacgacagaattcaaggatatgaagtttcctaagggttctgcagcctctcgaagataagtacagacgtctccgtaccgatccgcaagactctactaaacctgcttatgactggtgagacctattcagcctagtgctctgatactaacttgtcacgacccgcatccaggttgtgatggcgcctgtcgtggaaccaggctagccaaccattacaacaatactcaattcatttactagataaatttactcatttttggctcaactcatagaaatacggaaatttttaatcagttaaaaacagtctaacagaagaaataagctccaacaatcaatctaggatctggagtcacgcagtcatgagctactaacatcaatacaactgagaaataatactgaagttttaagtttccaatttctaatacagtctgaggaggtagtgacgaactcaacctccgtaaataacaatttgaataatgaatgtttcagaaataaccgagaatatcagtgacaatcatgttatataaatgaccctagaacttagtcacaatccgtgaataccaaataaatgccatgtatgttgcatgaaactctaacaggtggtcctatcgttacacataattggccattggcccagggaaatccatcccgtaacatgtacgacgtggtgactcagtcactaagtaccgagggagcaggccaattcatccttttggagaaatccatctccgggatatcatactcatccataatctgtaccagggaaatccatccctccatatctcataaacagtatctgtgccagggaaatccatccctctatatctcatatctcggacaaatccatgtccaggaaaatccatccctcaataactgtgcgctcactgggggtgtaaagactccggaggggccgccaagggtatggcccaagcgctatatatatatatcaagcccacgaagggtatatcatctcaacattcggctctaggcccatactcaatcagaattaccagtctcctcacaacactctcattatttaaacagcccaaacaatggcaatgcatgatagataaatgatttctgagagtgaaatacgaatacatgtataataacaagactgagtatgcacaagtaaagttcgcaatagaaacaatagtgacggaccctttccggtctccacatatagacatgaagttttatcatttatacttgttatgtttcttttagtttctacgcattaatagccttcacagtaccgatatcgtggtggaacaaaagttaaaccgtgcctggggataagccgggccacaacaaatcaaccaacgctcatatgcccgtcacttggcgagtgtatcatagtaactatcatcaattagcatgtacattggggttttgaacccctcagttccaaggttgaagccgttacttacctcgaaatcggctcaactctactccgcagggccctttccttgaggatcggcctccaaatgctctaaatctatcaataatcaattacatactgtcacaatgtgctaaggagcaatccctaaatcaaaatttagcaaaaatacccaaaatcccgaattcggtcaaaacccggccctcgggcccacatctcgaaagtcagagattttcacaacactaggttcctggtcctttcccgagtctaaccataccaagaacacgaaaatcggaccacaaatggtcctccaattcccccattcttcttctcttaaacccaagccctaaccaccatttttctactgtttttaccaaagatttcaacctaaaatcgttcttaatgcacaatataacgagttttgagtccaagaaacttacctccttgaagaaacaacgaaatccctcttcaaaaccccttcaaaacctccaacccgtgtgtaaaaatggtgaaagaagacaaatttcgcaaaggctgccttttatagttctgcccaggcatttccgcaacagcggtgtttttctcgcaccagcgactccgcaggtgcgacctttcaaccgcacctgcgaaacccacttaagttgcccagcttccgcacccgcgatacttttcccgcgcctgcgacatcgcaggtgcggacatccaaccgcccttgcaacctccttcgcacctgcggcctctttatcgcaacagcgggcccgcaggggtgacatattgaccgcaccagcggtccatcacttaacacctagagtctgcgccgaccaccccatctcccgcacctgcgacctcgcaggtgcgatctttcttccgcccctgcgatgaatttccgcccctgcgccttcactctcgcgcctgcgatgtccgcacctgcggcccaagcatcgtaggtgcggtcgcaccagcaacggcagcttcaactgcatttcaagttccaacttctccgtttaacgcccgaaatccaacccgagcccctcgggaccccaaccaaacataccaacatatcaaacatggttattcaaactttgtcaagccattaaaacacccaaaacgacatcaaaaccataaatgctcatccaattcaagcctatgatttccaaaaactcccgaaacacgcatttgatcaaaaacctaaccaaaccatctccgaatgacctgaaattttgcgggcaagtccaaaatgacctaacaaagctacatcaactctcggaatcccattccggccctcggaaaaaatctctcctatcaaccggaattcgccaaaatactaacttcgccaattcaagcctaattctacaccgggcaccctaacaatattctgaacatactcctaagtcccaaattaccttacgaagctatccgaaccataaaatccgaattccaaggtcgtttaccaaaaagtcaaatccgggttgacttttccaactctaaagctcttgttagagactaagtgtctcaatccactctaatttcactccgaacccgaaccaaccaaccccaacacttcatgaacagtctaatcgagctgctacaagacagaaataaaggaatagatgcgtatactgcgtaacgacggaccgggtcgttacaaactatcttaggaaaaagaaagataaacttaactaactaggaaatcaataaatatagtcccctagtatatggaaataagtcccaaaccaatcttggatagaatcttgaaaatcttgaaggaattttgcaagcaacttggcaccaacttgcactaaacatctagcacgattattctactcttcttggaaatcaagtaagtccttttatgatataaagccgtggctttttgtagtacttcatgggctgcaagtttagacacattttaggtgccaaattggtccaacagcggcctgatttggaccttctttagaggatgtttttttggatctaatccacctcttcttggacatgaattttggccataaagtatatataacacctagataactcatatcctttatccttaagctcttcctctcaactaataacttctttgatcgctcctgaagtccaatgaccttgttttgtaactttttagcttgagatctatttaaaggctctctttgagattccaaaacttcatccttgtccttgaatagatttgagattcctaggatgcaatcaataaatgagtatacttagaggagtcttcggcctcccaagtcatttcttctacattgttgtttctccaaagtactttcatcgaagctacatctttagttctgaatctctggatctgtctgtctaatatagcaatgggagtttcttcatatgatagctgctctgtggcctgaacgtcgtcaactaacatgattttgtaaaaatctccgatacatttacagatcatagacacatgaaagactgaatgtacagactccaagtctgaaggcaagtctaactcatactctacctggcctaccttgcgtatgatcctatatggtgcaccgagggctccctgttgttgttttatttcagattagtcatttttacttcttaccttagaatttattttccttctgtactattttaaactgttttacttataaatatagtagagccttaacatgacctcgtcactacttgactgggattaggcttggcacttactgggtaccaaatgtggtgtactcatgccctttcctgcacatgttttctgtgtgcagatccaggttctagtacacagttctgtggctagtggtcgtcgtagctgctttaaggagaccgcaaggtaattctgccgcgttcgcagaataccccgagtcaccttccattccagttagatagagacttttatgtatttccttttcgttgtatagagctattatatagagcttgtggcttaaaagtgacattccgggttttgggaattatacatgtacatgtagagtggcaatgttttgcttagtaaatttactttaccctgtctatatttaattttttagttaatattttacgcaaatttaggcttacctagtcgtagagactaggtgccatcacgataccttttagagggtaaattgggtcgtgacaattaagaattatctcaaattacttaaagtactactcatttttaatagactttatacatcataccatcatggtgatatggtaccttgtatggtactagtccataaatatcgggtattatagctcggaccgtattttatcccaaatcgacaaccttcaacgaaactcattttctttgattcgtttaccctttttatttcgtggcacttacttattgcttgttataaatagcataaatgcttataatctcaagaaaatatcatccccgagtctacttcaattaactgaggatgaaactttaatcatacggaatgcgagatgtaacagacacatggtcactatcttgttttattcctaccattttttcagattagtggatgccatttactagtgcttgtcttcgtttacttgcaaggtcaaaatttgaggacgaattttctttaagaagaggggaataatagcatcctaggaagctcaaatctattcaaggacaaggatgaagctttggaatctcaaagagggcctttaacgaggtctcaagctaaaaaattgcacaaaaaggtcattggaagcaagctactcggtacattatttgtaccaacgtccctatttccttagggacgttacgtttcatgtctgcaggtctcgatagacaggttgagaatcctccaagcaagctatcagcttaacacaaggtgttggtgcactccatttgctccgaagttttctattcggttgacatgtgttgataggtatagcggggccctatcccgacctttataacatttgtgtactcttagaggattgtagacagatgtcaagtatacttgtatgggcttgtcctatgttttgagtttatgaatgatcatgtcagccttataagcctgtatgtcacatgtataagtttttatatcatgtcgggtcatcatatgtctagtattcccttatgttttattctgattatcttatgatggcccttttggctaccaatgatagtacgataagaaatatatgttacgttggtacttggtggagtaaggtaccgggtacccgtcgccgcccattggtttgggtcgtgacaagttctctcatgacaatctttctggttcatttacatatatagtatgatacaaaagatatgttacgtttgtactcggttgagtaaggcactgggtgctcgtcgcagcccagtggtttgggtcgtgacaaaagtggtatcagagcagttctgtcctagggagtctataagtcgtgtctagtagagtcttgtttatgggtgttttgtgcaccacacttataagcaggaggctacagggcatttaggactgtcactctttaaggtactctagattgtgtggtggagctcagttgtaaaaactcaatttcctaaactctatcttattcataacacgaagattcctacatctaaaaagacggttggtaagggattaaatgtggttgtggaagagttgagtcggaggaactcgattttccatgatacttataatgagtaaatgtaaggtcttcagtggaacatgtgtgtactaacatttaaggttcctgataaggagccttgtaagaatatcaatccacccatatggtgaaaagttatgagagatttagaagttagatacaagtttcaacaagtaaaagaagcaaggtgaagaagggtacgaggcgcccagctaatgaagattatcagtatttacaattgaggtagagaaatataagcattttgagttaccttcaacaataacagatgtatgtacaatcgaccacacccatctcaattatgcccaacgggttatgatgatacggctggggttagagtaacccaaaatggtggatggattgtttgcgtttgttgaccaaaggatattgcaaatatgctaatagatctccttgtgagaaacccagatggtgcactctaaaatattacaattagatgtgaatactagaatgttcataaaattcagaagataggcactaaaagatggaagagataaatattaccttggtgtggctcctgtccctagaagatcgagaactttaagcaacccgaagagccagtggatggagcgaggggagctaaaaacaaaagaatgtcttgctgaaagttttcggaataaagtgatagatttcatgttagcgggaaaaaaagagagttaatgaagcattatgagtaagatgcgatacatggatgaaaggtagatcaagaaaatgacagtattcaaagtctatagtcaagtgaaggaaaagacgagaggtgacaggccttaggacaacaaaagagcataggccatataatcatagcctcatttcgagaaataagttcatgactctaacgtgatcaccagaaggaaaatttagaccccatagtaatagaaattagtatggattggtgaacaagataaactaaacatgaattagggactgagtgatttgataatggttggcatcatgagaatttcgtattgcattttggcgataatagaatggacaatagaagaagattcgtgagaaattcatagaatgatcattaaggaagacacttgcctaaagcaagctatgtgagtaaagttaagcttaagggactgtatgtgtcagttacactaagtgtcacccttgcgagtaaggaaatttgtcatccttggtacaggaggattaccgcaaagtgagtaagggtcatcgatgatgtgaaaacatgccaaggatgaagaggtaaaacagaatagctagatcgtcatatctctaaatcttagtatcccccttaaagaggggaaaatagagtgaagtgacattaacttgggattaagtggttctagtaactatggaatggtaaaagaagaatgcgataaaaatgagattgcacttattcaaatcccacaatatgctaagattccagaatattatgcaaacacgacgtcaaggggaggaagtaatggttcttgcccgagatgttattaataaataaggagccattccaagacgtaagttaagataaaggaaataacccaagaaagattatgcgaaacattgatgtgagaatgggccaacgagtagttagtaattgatttaggaagagcgtaacaagaagatactgacacatcaacagattgtgcaaaataaacatagtgaaccccaacatggggaattcatgttacaccccatgttttcgtaagtgaaagtatcccataagtgaattgatggaagctcataaatgagatgttacatcccgcattttcgtatggtaaggcttcgtcgtaagttaatcgacataagttcgaaatgagattattttgggattataagtattacgttatttcaaacaagtgataggtaaattcgtgaatgtgagagggtaagcaaatcgaagaagatgagtttcgtcgaagtttgtcattttgagataaaatacggtccaagctacaataccccatatttatgaacttgtgccatacaaggtatcacatgatcatgatagtaaggtgtataaagtgtgttaaaagtgagtggtattttaagtaattgagataattcttaattatgaggatacttaattaatggtagggataattgtggtattaagaaggattaagtgaacaaggatatttttggggcttccacatggcattaagccaagccaaagtggcaaaatgtgcttgatgagtcaaaagacataaagttgccttgattacacgttctcctttggaaaatttagagataggacataagttgccttggttggtttcttatttgggaattgatttagagaataggaccagcaacattgcttaattggtttcttatttgataacgttgcttccaaataccagcaaagttggatactctgacggatggaattttctttctcaaggggattcttatgaattgtaacgacccggtcggttgttacgtagaacttgtattgtatttactcttttttccttatcgttatactatttatgatgtgttagagttggtaggctcggaatcggaatggctgtagcaagaatataagtcatttagtctttaaaacagccttatagttggaaaagtcaattgagagttgacttattggtaaacgacctcggaatgcggattttatggctcggatagcttcgttaggtgatttgggacttaggagtgtgttcggaatttttttgtgatatctggtgtagaattaggcttgaattggcgaaagttagtttttggtgattttcggtcggcagtggaaaataggctatcgggttcggaatggaattctgaaagttggaatagattcataatgtcattttggatatgtctgcaaaatttcaggacaatcggagttgttttggatagtttcggcatcgttggtggattttataaatttcaaagttcataggcttgaattcgatgtaattttggtgttttgatgttatttttagtgttttgagagtgcaactaagctttaatgatcatttatgatatgttggtaaaagtggttggggttccgaggggctcgggattgatttcggatggttaacgggcatttttggccttatgagtctgctgaaaaatctggtgttctgttgctggtgtccttgtacgcgatcgcagggattaattcgcgatcgtgtaggcttgttggtggccagagtgaatttgttcttcgtgatcgcagggtcaggtccgcgatcgcgtagcactggaggtctatttagtgcgatcgcatgggataagtcgcgatcgcgtagagttagtaggtcgagccaggaggtcacgcatttgttcttcgcgaacgcggtcgaaggatcgcgatcgcgtaggttcatgtcataaagaattgcgatcgcagagggtatatttgagcagatgaaaatttgtgcttcgtgatcgcgatgtgggtcccgcgatcgcgagaaaataaatacctgggcagtatttaaataaaccctccgctaccataacctatttttccacgatttttgaacgggaaaagagctttgagacgattttgaagagaggtaatcattgttcttccttgaggtaaggattttggaccctaaaactcgattatatatgattaaggatcaaaataccagtgtttaattcatgaaaattagtagaaaaatatggagtaagggcttgagattatgagacctttaggagatgatttgaggggtcaaacgaacccaattttaatattctttatatgtacggactcctgagatgatgaagaacattttggtataaaatttgtcgacttccgagacgcgggcccgggggttgggttttggctaatttcgggttttgagctaaaatttgtgtttttcaattggaatgcattcccttagcataatattatgataaaaatctgatcttggtagatttggagcactcgggagttgatacgagaggcaagcgggttgcagagtagcttttcgggctagtttgaggtaagtaatgtatttaaatcatgtcctgagggtatgaaaccccgtactttacatactttcacggatttggagtgacgcacacactggatgacgagtgtggggcgtgcacaaattggaaatttggaaaaatgtacgttttaggcaactattgagttgcgaaactgctttttaaagcttattctctgtagtactactatgatttgatataattgggttgtaagccatgtttggggcctagtgccgatctgatttaaccgcttaggggctattttgctgatattctcactactttgaaactatgaattttacactcagtctttcttgtgaaattgttgacactcctatttgatgatattattatttcttgaaatgaaatactattttgggtcgagaaccccgttttaatcatggcccgagtggcatgctgagagtgtctgattgagtgaggctgagggccaatgttgtgaggatgttatgatatgagagaggccgagtgactgagagtgatttatgccatgatatggcttgtttatagcgcttgggttgtaggagcccctccggagtctgtacacacccccagtgagcgcaggtacctactgagtgcgagtgccgagtgatgagtgattgggaggcatgagtgacagtgaggtttcctgcggggatgatactgagagatgatgaggtgctgagggaaattgatactgactgatgattatggcccgaggggcagttctataatgatattttactgagttttgactatgattcacttcatttttcaaactgatattactgagagttttactgagatatattggaaacattatacttgtttcaaaggtttttttggaaactagttttcgaacttatgtatactgtattgagacttgatgttttactgttttgtggattggtgttttgtgttgtgtgtttcatatacttcagactgtgatttattttcattactactgagttggcgtactcatcattactctctgcactcctgtatgtagatccaggtactggttcggagcagtagtcgtccgagttcgtggtcatcagttacgggatttcgaggtagctgtccagcgtccgcagcttctccatttcccttccttattagtattagtatttatttcatagacattagcagagtaagttttatttttttagatgctcgtgatcggttgactctagtcttgggagatttgtttagactgttagattattattggggcataaagacttaaagaaattattttatacactgtttgctgcttattattgattttatgaaatattataatagaacaaatgtgtagaatgtgatggttggctatcatagtttcacgataggcgccatcacgacctgttaggatttggggtagtgacaagttggtatcagagctctaggttacataggacacaacggtcatgagcaggttcagtagagtcttgtggatcggtacggagacgtttgtacttatcttcgagaggctgcataactcttaggaagaatctcaatttcttgaactctttcgtgccaatctattggttcttgaaatctaaactcatgttgtttcattctctcacagatggtgagtacacgcactaccgatcagggtgaccagacaccagcccgacccacaaggggtcgaggccgtggtggagttaggggaccagtctgtgcagcagccggggcagtaccataggatccccctatcattcaagatcaggttccagtcgagggtgctacagctagacaggcttaggcaccgccagtgcctattgttattccgggtcttcaggagacctaggctcagatattgacggtgtgtaccagtttggctcaggcagttgctatgtctactactgccactacagctcaggccgggggagtcattcagactctagctgcccggacacctgagcaggctgtacagggtattcaggaagcgagggtagtcctagcccagtcggttgccccagttcaagactatgtagttccagctatgcccgaggatgagcagcgtaggctggagaggttcagtagacttcagcctccgactttcaacggcacagagggtgaggatgcccaaggttttatggataaatgccagaggatactacgtactgcgggtattttggagacaagtggggtatcgtttgctacatttcagtttgagggtgcttctttcacttggtcggaggcattcgagaggcgtaggctggttggttcagcaccactcacatggcagcagttctctacgatatttttggagaagtatgttcctcagtcacacacagaggagcagcgcagatagtttgagcagttgcgccagggagagttgtcagttactcagtacaagatgcggtttttcgagtttgctaggcatgcttctgagttagtccctactgacagggagaggatcaggaggtttgtagatggtctcacgtatcagcttcgaattttgaagaccagggagagagtgtctggagctacatttgagcaggttattgacattgctcgggacattgagtcggttcgtaggaaggagcatgaggagagggaggccaagaggcctcggggatcaggtagcttcagtggtgccccttctagagggcagtttcagcacagcagaggtcatctatttagacctcctcagcaagttcgcccagcttgcagtggtgcatcttctgggcagggtcctcgcagttctcatcaaggatgttcatatttcagtgcccttccatcttagatctcctccagagcatcatcaatcacggttcttttatgcacggttcatccggcggctatcatggtggcaggggttctcttcagtctccatctctagctttaggtggttgttttgaatgtggagagttcgtacatgggtggaggcagtgtccccaccatactggtagttcatctcggcagagagttcatcccacgacttcagccccagtcacttcaccacctacccaggcagccaggggtggtggtcaggcagctagaggcggccctaaagggggaggtcgaacaggtggaggccagccacgtatttatgcactttcggcttggcctgatgctatggcctcagatgcggtgattataggtactatctcagtttgtcacagtgatgttttggctttatttgaccctggttccacgtaatcttatgtctcatcctatttttctcactttctgaatatgccctgtgagtctttagttatgtctgttcatgtttcgactccggtgggcaatactatttttggtgaccgtgtgtattggtcatgtcttataactatttggggtctagagacccgagtggacttgatgttactcattatggttgattttaatgtgattctgggcatggattggctatccccatgtcatgttatccttgattgtcacgctaaccgtgaccctagctatgcccggagttctgagagttgatttatagagcatgcgcctagcaaagggatttcttatttgaaggctcagtgtatggttgagaaaggttacgaatcttatatttcttttgtgagggatgttattagtgagactccatctgttgattctgttcctgtagtatgtgactttccgaatgtattccctgcagacctaccaggcatgccacctgacagggatattgattttggtattgacctggtgcaagacacccagcatgtctctattccaccttaccgcatggcaccagcggagttgagagaattgaaagagcagcttcaggagctcctagataaggggttcattcggcctagtgtgtcaccttggggtgcaccggtgttgtttgtgaaaaagaaagatggctccatgcgtatgtgtattgattataggcagctgaataaggttacggtgaagaaccggtatcctttgccccgtattgatgacttgtttgaccaacttcaggaagctagagtgttctctaagattgatttgagatctggatatcatcagctgaagattcgggactctgacattctgaagactgctttcaggaccagatatggtcattatgagtttctggttatgtcatttgggctgactaatgccccagccgcgttcatgcaattgatgaacagtgtgtttcagccttaccttgattcactcgtcattgtgttcattgatgacatcctgatttattcccgtgtccaggaagagcatgcttagtatttgagagttgtgttacagaggttgagggaggacaagctttatgcaaaattctccaagtgtgagttttggcttggttcaatagctttcttgggccacgtggtgtctagtgagggtattcaggttgatccaaagaagattgagacggtgcagagttggcccaggccgtcctcagctacagagattaggagtttccttggtttggcatgatatttcgtcgctttgtggaaggattctcttctatcgcttcaccattgaccagattgacccagaagagtgccccattcatatggtccgatgagtgtgaggagagctttcagaagctcaagtcagcattgaccacatctccggtactaggtttgtctactggttcgggttcttatacaatctattatgatgcttctagagttggtttgggagcggtattgatgcaggacggtagggtgattgcaacgcatcgagacagttgaaggtgcacgagaagaattgtccagtgcatgatcttgagttagctgccattgttcatgccttaaagatttggtgccattacttgtatggggtacagtgtgagattttcactgaccatcatagcttgcagtatctgctgaggcagaaggacatgaatttgcgtcggaggaggtggttagatattctcaaggattatgacctcactattttgtatcatccggggaagtccaatgtagtggccgatgccttgagtcgcagagccgagagtttggggagtctagcttacctttcagcagcagagcgacctttagcacttgatgttcaggctttagcgattcagttggtgagattcaatttgtcagaccctctgcaggtattagctagaatggcttcccggtcttctccttatgatcagattagagctccgcagtatgatgatccgcatttgttagtacttcagggtaggttccgtcgggatgatgccagggatgtgactattggtgatggcggtgttatgaggatgcagggctgtatttgtgtacccaatgtggatggtcttcgagagttgatattagtagaggcccacagctcgcggtattccatccatccaggtgccgcaaagatgtatcaggacttgagacaacagtattggtggaggcagatgaagagatatattgtgaagtatgtagcacgatgtctcaactgccagcaggtcaagtatgagcacgagagactaggtggattactacagaggttagatattccggagtggaagtgggagcgggtcactatggactttgtagttgggcttccacggacttcgaagggtttttatgctatctgggtcattgtggatagattgaccaagtccgcgcacttcattcctgttggtactacttatacttccgagaggttagatggtatttacattagggagattgtctggttgcatggagttccggtttctattatttctgatagaggtactcagttcacctcccagttttgaaaggtcgtacagagaggtatgggtactcaagtagagttgagcacaacatttcatcctcagaccgacgggcagtcggaacggactattcagattttggaggacatgttgcgtgcatgtgtgattgattttggtggttcatgggatcagtttctgccactagcggagtttgcatataataacagctaccagtccagtatttagatggccacatacgaggctttatatggtagaaggtgtagatctctggttggttggttcgagctcggtgaggctaggttattgggcacatatttgattcaggatgcgttagagaaggtgaagttgattcaggagtgacttcgcacggtgcagtctaggcagaagagttatgcggatcggaaggtccgggatgtgtcatttatggaaggcgataaggtactattgaaggtatcacccatgaagggtgttatgagtttcggaaagaggggaaagttgagtccacggtttattggtccttttaaggtacttcagaaggtcggagatgtggcttatagacttgccttgccacccagcttgtcgagtgttcatctgttatttcatgtgtcgatgctcaggaaatatgttggtgacccgtctaacgttttagacttcagcacagttcagcttgagggtgatatgtcatatgaggtagagtcagtagcaattttggaccgtcgggttagaaagttgaggcctaagaatatagcttcagtaaaggtacagtggagaggtcagccagtggaagagtatacttgggagaccgagcgggatatgcagagcagatatcctcacttgtttgagactccaagtatgtttctagacccgttcgaggacgaacgtttgtttaagaaggggagactgtaacgaccatgtcggtcgttacgtagaacttgcattatgtttactgttttttccttgtcataggttggttatactatttataatgtgttagagttggtaggctcggaatcggaatagctgtagcaagaatttagtcatttagtctttaaaaatagctttatagtttgaaaagtcaactgagagttgacttattggaaaacgacctcggcatgcagattttatggctcggatagcttcgttaggtgatttgggacttaagagtgtgttcgaaatatttttgtgatgtccggtgtagaattaggcttgaattggcgaaagttagtttttggtgattttcggtcggcaatggaaaataggctatcggggtcggaatggaatttcgaaagttggaacagatttgtaatgtcattttcgatatgtctgcaaaatttcaggtcaatttaaaagttcataggcttgaattcgatgtgattttggtgttttgatgttatttatagtgttttgagagtgcaactaagtttgaatgatcatttatgatgtgttggtaaaattggttggggtcccgaggggctcgggattgatttcaaatggttagcggacatttttggccttaggagtctgctgaaaaatctggtgttctgttgctcgtgtccttgtatgcgatcgcaaggattaattcgcgatcgcgtaggcttgttggtggtcagggtgaattttttcttcccgatcgcagggtcaggtccgcgatcgcgtagcactggaggtctgttcagtgcgatcgcgtgggacaagtcgcgatcgcgtagagttagcaggtcgagctaggaggtcacgcgtttgttcttcgtgaacgcggtcgatggttcgcgatcgcgtaggttcatgtcataaagaactgagatcgcatagatctagccgtgacagagggtaaatttgggaagatggaaatttgtgcttcgcgatcgcgatgattaaatacctgggcagtatttaaataaaccctccgcgaccataacctatctttccaccatttttgaaccggaaaagagctttaaggcgattttgaagagaggaaatcattgttcttcattgaggtaaggactttggaccctaaaactcgattatatgggattaaggatcaaaataccagtgtttaattcatgaaaatcagtaaaaaaaggtggagttagggcttgagattatgagacctttaggagatgatttgaggggtcgaacgaactccgattttaatgttctttatatgtaccgactcgtgagatgatgaagaacatttttgtataaaatttatcgagttccgagacgcgggcccgggggtcggattttggctaatttcgggttttgagctaaaattggtatttttcaattggaattcattcccttagcataatttgatgataaaaatatgatcttggtagatttggatcactcgagagttgatacgagaggcaagtggtttgcagagtagaatgcgactctaagggagcacgatggttggctagcctagttccacgataggcgtcatcacgaactgttaggatttggggtcgtgacatgaacccttataacgctacagtagcgtaaaatgtgactctaagggagcacggtacaatattactcaagaatatcatatggatttctccctacttcgatccgtcattacgtattttgtcacaattgacgtgtcaaagggatgtcaagagaatcggctcaggtatgttaaggctatcccttctttcttttggcgtgatctatacgacacaaacgaagtatacacgtatataacgccatctggtcacaggtcaatgtacatatgaatgaatgcaatgcatgagaagtaagtcaataagatctctcggaacgtcatacttcgattaataacatgaaataaactttatcaacttacgtattttctagtaccatgaacagacgattggctaataggacacatgtggaatcaagaacataggaaccccaagtacttttaagaatagtgtcatttgtgaaagtcacgcgtttgctcgtttcgtttgtatcatatggatcatgccaaaagaaaagaagggatagtcttaacatgccttttgtcatttaccgaaccacacgacgtagatttagcccgtgatagcatcctaggaagctcaaatctattctaagacaggatgaagctttggaatctcaaagagggcccttaacaaggtctcaagctaaaaagttgcacaacaagactccaagagagaacaaagaagttgttagttgggaggaagagctcaaggataaaggatatgagttgtctaggtgttataattactttaagtcccaaattcttgtccaagaagaggtggattagatcctaagaaatcctctgaagaaggtccaaatcaggctactattggaccaatttggcatctaaaatgtgttcaaacttccagcccatgaagtactatgtaaagccacatttttatatcataaaaaggacttacttaatgtccaataagggtacaatagtcatgctagatgttgagtgcaagttggttccaagttgcttgcagatttccaagattcgcaagattctatccaagattggtttgggacttatttccatatattttggtactatagttattgctttcctagttagttaatgttatgttttccttttactaaaaaatttggaattactttccaagaatgacttggttttctattcctagtattttccttttcctaaggtagtttgacttgttgtccaaagtagttaaggacttcactttcttatatatatttttttagccttaacctcgtgaccccctactacctatataaggggtatcttatttgtttttagacttggattgttataaataatatcaataaaaattatgagatttttcttacattcttgtgtgtggctactcttggatttattcttcaaccttcaagactctacttaaggtggtatgattaaacccttttcgaaatcttagatcacttctaggtattcaagaaaggtgataagtttagtcttattgttgttcttgttattctaaagggtcgggtttcacaatttatttcttgtttttaagtctctaccaaggcgattattttttcgttagctaattgttgttgttaggattcaacttcaagaatagacttcttgaattcaagaaactctttcttgaattcaatctatctttaatttctgtcttttttgtttctttacttttcttttaactttcgcgcatttttttatttctttagtagttctcggacccctatcgtgtagtcatcaagtggtatcagagcataggctaatcaagatttcaatcctattctttaagtcagcccaacaaaaaaaaagaaaagtaaatagttgtttggtttccaagtcgataaaggaaacaaggagaggtgatcctagttctttaatgtttttccttattcttgtgggttttgggtttctaaattctttcctttttcttttgaaactaaccaattcctattctttctaggttttgtcttccactttccctttcattttctaactccttattcttatcactaaatggttgtgacttgttagatttattaataaatttaaagataaacgaccaagagttgctttgagtgaaaaaaggcaagagaggtgagagtattaggaggaaaaagccaaatttgaaagatacataattcttctaatcttttcttcaagatgtttcaaacaagtagttatagtgaaaggaggcaagctatgactcaacaacttgaaaagtcgaacttacagtatacgaatgggagaagacaatggtaaagttattttcaaacaagagataaagtgatgtctacgatttgtgaccttagaattgacaaagagtttggatataactctattagcacttatatggttgtgaaattgaacttgtcttgtgttgagcatattgaaccctacatgttgagaggagtgaaggtagataaaatagtgttattacaattctctattggaaggtatgaggatgcgatctgttgtgatgtgattgccatggtatgtttacataagagcttcatataacatggaaaaaatagatactcttttgaggttaacgggaagaaactcattattgggcctttggctccctcataaatttgtgaagacgagagaatatggaaaaatatgagagagaagaatgagaggagtaagggagtgcatgttgacatcccaggagaggaaaaaggagagattgtgttgagtgaagagagtgggatgtcaaggggggaaagagtaagcttgagaggaaagaaaagagataagcccatgagatagaaaaaatccatgaggtagagaaataagagggttcgagtgaagaaaaagaagaaaaccttggtgagagagtagaggataagggttaggagaaagttagtcttgtgataaaatccaaagagagagtatgcgagaaaaatatttctttactttctaactcactaaatctttcttgttttagttcttgtgattttgtgtagtcaagtgttgaaagaccttttgaaagggaagaaaagacgcaagagatggtggcaaaggatccaattggattccaacatgaatttttcacaatcaattattgttatatggtgaaagataatagcttggttaatttctttgttgttgaaccttttgactcttttgatccttatttacaggtttacaaaatagagtttcctaaaggcattgctaagttagacccattgcataaaagaataaaaggtgatgtttttccattagtaaataagtccaagtatggtatgtataattggtttattcatattcttggtctttctaaaacacctaaggtatttttggaggtaatgaactacccttatttcttattttggtgacttcataatttttatggataatgatattttgatgcatatcaagtcattaactgtaatatctaagttcaagtgcaagagtaatttgcttccttttgaaattgagtatgacatagaatattatatgttccaacttgatagaaaaggcatgaaatttatgcgaagaagcttggaaatgagttttcatgtgataaatttctagaatgtgagttttgttgtgtgataggaagtcattcttctagtcatgttaattgtgaatgtgtaaaagtatttgatactagtaaagaggttatgcatgattattgtgacgttagtgatgaaatactctttcaagagcttatctatgactctttctgtgacagtttgagcaattgttaagaatcctttgactttgagaatattattggtgaaagcaataataatgagaatgtattgatacttttattttgggaattatgggttcttataaccttcttgtgaatttatgtgcttctttgaatagcttacatgtagaagaatccatgagatttgtaattgataattggctatatcataaaagtgtcttatttgaatacatgtgatagagatacttgttataaatggatgcatgatcaatcttttgtaatttagttgtcatgcacatttttggactaccttaagagaggtttttattcgacaaatccaagtagacataagttttattgtgatgatgatgtccatatgatttataaatgtgatgacccaaaaggtcatcctatgtatttttagctaattctgtgttctgagatcgtgaaaacctccttccatatcacttcgatttgggttcacagcccgggcgtgtagccgggaagccgttatgagaaaaactaatgaaaatgatatttttgtgttgaaatttgggtaaagttgactttagtcaacatttttgataaatggacccggaaccgtgatttgatggtcccggagggtccgtaggaaaatatgggacttgggagtatgcctggaatcgaattccgaggtcccatgtccgagaaatgaatttttaaagaaaattattttctgaaaaatataaaggttttttcaattgaatatttatgtgaaacatgtggtattgggcccgtatattggttccggagctcgatacagattcgatataatttatgagtgttatctgtgaagtttggtaagaaacggacttggtttgacgtgattctgatcaaaaatgaaaattttgaagtttaagaagtttttgagaaatttcattgattttgaggtttaattcgatgtttagaatgttattttggtgatttgattacacgaataagtccataggatgtttttgaggttgtgttcatatttggttttgagccccgagggctcgggtgagtttcgggtaggtgtcggagtgcaaaacataggaaatatctggtgtttgggatcagatctggtgtctggtgcaatacccttcgcgaacgcatggtaacccaacaaacgcgaagggcaaatggagatggcatggggttttactctacgcgaacgcgtagagggagtcgcgaatgcggagcactaggcagtgtctctacgcgaacgcgtcccctagggtgcgaacgcatagaattaggcttgggctgggggctgggtagacttaatgctacgcgaacgcggcccacagcaggcgaacgcgtaagcctggaaggatagaccctcgtgaacgcatccatggtctcgcgattgcagaggtcaattgagttaacccttcgcgaacacggcctggggcccgtgaacgcgaagagtaattttgcccagcgatttttaagttccaaaaacaaaatgtattacgggaaattgcccatttttcataaacttcatcttctccacacctcttaggcgattttgaagagcttcttcactgtaacctcttaggtaagtaattctaaccttgttttcttccattttattaacacccattagattctaggcctaaacacgtgggacttaggttagaaattagggatttgggtagagttagggctttttgattatttgggaatttgacctcgttttggggtcggatttcaaaacaaattatatattcggactcgtgggtgaatgggtgatcgggttttggtccgaacctcgtgttttgaccaagcgagcacggggtcgatttttgggtttttgggaagaatgttgggaattctataattaagccttggaattgaattgtttagcatttattgatgttattgggtcaattatgtctagatacgattgatttggagtcgggttcgaaagaaaaagcggtgctagaggcttgatttgaattcttggagccgaggtaagtgtttgccctaaccttagcttgagggaataggtatggagtcatacgtgctatgtgtttatcccatgttcaatgtataggtgaggtgacgagtacctatgcattgttgtcaagcatgcctgtgagtcggtctttatgatatgtgtttttctccgttatttactgtgttatgaagtagatttcattttggaggttattcaatttttggaaatatttggttgtgaacactgttgattaattgttcggttgaggtttttttttttttttttttaagttttacacttgagcgagattggttatagttgtgtctcttgctgggacggtatgtgtttctattgttgttcccttgccggtatgttgtgaatatgatacatgttgttgattttccttgccaaactgttgttcttgatattgtttgggtgaggaagagtgtaaagcacgaagggtgatgccgtgtatttatttattgcattgtgaggatgagagtgtaaagcacgaagggtgataccatgtatttatttattgcattgtgaggatgagagtgtaaaagcacgaaggatcatgccgtgccatttttatttaattatttctttggtgaggatgagagtaaaagcacaaagggtgatgtcgtgcacttgttttggtgaggatgagagtaaatcacgaagggtgatgccgtgtaattgtttgctctatgtggttacttcctgttactattttgatacttagactgttactttgttctgtgattcagtaattgtttttcccttgtccccagcatgttctcccccgttttacacttaactgttcatttcctgccattattcctgttatatatattattgaatcgtacaggtgtttatttcgtgccctagcctcgtcactacttcgccgaggttaggctcggcacttactcagtacatggggtcgattgtactgatgctacacatgcacttctttatgttgtgcagattacgataccggacccggtggacagtgatcgagggagtatccttcagtccacaggcgacactgaggtagtcctgcaggcgtccgcaggccttggcgtcacctcctatctctttcctttctctgtctttcctttgtatttctgagacaattgtatatgtttattcagaccctttgtttttagtaatcttaggcagtccgtgtagttgtgataccagttctaggggttttattaaggatttttttatattaattacttaagttattgaatttcatggcttccatattcttattcatatttgtttcgtcattgctttgatttcaaatgtctaataataaggaaatgagtatatttgactagaacattggcttgtctagcgggttcaaagttagacgccaccacggttcccacggtgggatttcgggtcgtgacaataaaggagtatttacacctataaagcttaatccgactaagtggaaacatggtcaatatcttgttttattcctaccatttttcatattagtggattccatttactagtgcatgtctttgttttcttacaaggtcgaaattcgaggatgaattttcatcaagaagaggggaatgatagcatcctaggaagctcaaatctattcaaaaacaaggatgaagctttggaatctcaaagacggcctttaacaaggtctcaagctaaaacgttgcacaacaaggtcattggacttcaggggagaacaaagaagttagttgggaggaagagctcaaggataaaggatatgagttatataggtgttgtcacgacccaaaatcctaacttaggtagtgatggcgcccaatgccgaggtcagacaagccaacactcgtgttactaacgagatttccttatttgataaactgttccaagacttgccaaattttaaggttaaagaattgtaaggtgagaacatataacttggccaactcaaatcaacataaccgaaaggaacgtaataacatataaagtgccaaaatataatatctactacatgtgccagaacctagtgtcacaaatctacgggcggactagtggaatatacaaaataagataaaatactgtgctactgtctgaaggaaatggacagaaaaagcaaaagacaactcccaagtgctactaaggatcgccaagggggaagaagctcaccgtggagtcgggtacaaagtatgctctctagatcgcgctccggtcagataaccagatgcacctgcctcagaacctgtacaattaagtacagaagtgtagcatgagtacatataaacaaatatgtacacagtgagtatcccgtctaatctcgaagaagtagtgacaagaggtcgacgtgatacttactagggtcaagatgtaataatataagtgaatgaagactaggcagggatagcagttccagaaatcacaagacatgaaaatatcaagtataaatttacaatttacctctgcatgtcaaatcacactagtaataagtaaactaacttttccttttcacatgaagcattttatatgataacaacaagactctcagtcaaaacatacagcacatagtattgccgaagcgtacggccgaagcgtcgtgaaaataaatgtgcattgccgagggtcgaacaactcgaatcatagatgcatctattaccccgctcacgaatcgaacatgcgacgcggttgacataataataataaggctaccccgctcgcgaatcatacatgcgacacgggtgctcgcatacatacacagaattatcaggaaatccaggaattcaatagagattattcttgcaaacaagaacttaagcatctgaaatattgaacgtaacttcctaatattctcatgctaattcaagggtaataagcaactcaaaatacatttaggggtacatgtaaggcacataaaagcatgcttgtgagtcctaaaactacccgacatggcataatagtagctacgcacgggctctcgtcactttgtgcgtgtgtagcccccacaaataaagacatttgaatcatgattacctatggggacaattcccccttacaaggttagaaaggagactcacctcgtgtcaaatctacttctcagaccaagaacgcgcccgaaaatccgaactctacactcgaggactccaaactagccaaatgttatgcaaatatatcaattcacgctcaaagtatggaaattatcctacttatttagtaaatttatcattcttgaaggaatcccaaaattcacccccgggcccgcacgctcggattccaaaaatttacgaaggaaacactcacgcataacctaaggatcattaatatgtgatttttacttgatttcatggctaattaacgggtaattcctcaaattcttgaaagctctaggttactacccaattccttgattttcactaattaggtagttaatttaactaggaattcatgtattaaactaacactagggtagaatttacttacctcttagtagctaggtcgtggggcttttttccaagctttcaaggtctctaatggaggaaagaaaatggagaaaatgaacttttcccgtgtttacaagaacacactgccgacaatggttctgcacctgcggctcaaggaccgcacctgcggaaatggacaagaggtcctgggctcgcacctgcggagaggagctagcacctgcggctccgctcctgcggaatattgtccgcatttgcgaagataggcagcctcacctggggccgcacctgcgagtcatgagaccgcaggagcgatcccgcacctgcgactgggcaaccgcacctgcggtcacaccagaacaggtgcaccaataattgtttcagttggtttttagcctcgtatggtgcccgagaggcacctgggcccacccgatcccccatccaaatataccaacgtgtcccaaatcataatacggactggctcaagccttcggaacacccaaaacaatgctaaaactcaaaaattactcctccaaacccctaaagaacaaacttaagaacttcaagttcttaaattcaatatcgatgcgctgaactgacctatactactcggaatgacaccaaattttgcgagcaagtcataaatgacataacggaactattccctatctcggaattccgttcagaccccgataacacaaaaacacattccaaaccaaatttcaaacttaaggaaactcttatttcgatattgggcgccgaaatgctcccgggtcatccaaaacccattccgaacatacgcccaagtccaaaatcatcatacgaagctaccggatctgtcagatctaaattctgaggtcgtttactcaaaatattgaccgaagtcaaacttagacaaaaaggccaaccttaaggaactaagtgttcctataccactcaaaacacttccgaatcccgaaccacccgtccccgcaaatcataaattacaataagccgctatgagaagtttcatttaggggaacggggtccgataacgcaaaacgaccgatcgggtcgttatattctccacctcttaaacaaacgttcgtccttgaacgggtctagaatcatacctgatgtgctgaataagtgcggatatctactccgcatgtcctcctcggactcccaagtcgcttactcgacttgttggcccctccactggacttttacggcagaaactctcttggatctcaactggcaatcctgcctatcaatgatagcaacaggctcctcctcgtagcccaacttctcatccaactgaatagtgttgaaatcaaccacgtgagagaagtcggcgtggtacctccggagcatggatacatgaaagaccgatgaacccctgataaactgggaggcaaagcaagatcataagcaacctctccaactcgcctcaatacctcgaaagaacttataaacctcgggctcagcttgcccttcttcccgaacctcataatacccttcatcggcgagaccttcaacagtaccttgtctctctccataaatgctacatcacgctccctctaatccgcgtaactcttctgtctggactgtgctgtgcggagcctctcctaaatcaacttcactttctccaaagcatcctttaccaggtcggtgccatataacttagcctcgccaagctcaaaccacccgataggagaacgacaacgccgaccatacaaagcctcaaatggagccatctcgatgctggactgataactattattgtaagcaaactcggccaaaggaaagaactggtcccactaaccttcgaagtcaatcacgcatgccctgagcatgtcctccaatatctgaactgtacgcttcgactgaccatcagtctgagggtggaatgccgtgctgagatctatctgggtacccatctcactatgcaatgctctccagaagtgcgaggtgaactgagggcctcgatctgatataatggacgtcggcacaccgtgcaaccggactgtctcctgaatgttgatatgggctagcctctcagaggtacaagtaggctactggaatgaaatgcaccgatttggtcaacctatctacaatgacccaaaccgcgtcaaccttccgcaacgtctgaggcaacccaaccacgaagtccatagtgatgcgctcccacttccactcaggaatgggcatctgctgaagtaggcctcctggcctctggtgctcatacttcacctgttggcaattaagacacctagccacatactcgactatatccttcttcatcctcctccaccagaaatgttgtttcaaatcacgatacatcttcgtagcaccaggatgaacagaatatcgtgaactgtgagcctcctccagaatcctctccctcaggccatcaacattaggaacacataaacggccctaaagtctcagaacaccatcctcgccaatagcaacctccttggcaccactctgaatcatgtctctcgaagctctgccagacatggattatcaaactgttgagccttaatttcacccaataacgaagactgagcgaccacatgtgctagaactcgacgaggctctgaaaggtctaatctcaccaggcgattagccaaggactgaatgtccaaggctagaggtctctcctttactgcaatataagccaagctacacgtactttctgccttccttctcaaagcatctgctaccacattcgccttgcccgaatgataaagaatggtgatgtcataatccttcagcaactcaagccacctgcgctgtctcaaattaagatccctctatttgaaaaagtgttgtaagctgcggtgatccgtataaacctcacaggacaacccatacaaatagtgcctccaaatcttaagagcatgaacgatcgccgccaactccaaatcgtgcacaagataattcttctcatgaaccttcagctggcgcgaagcataaacaataactctcccttcctacatcaacacacgccccaagccaacgtgtgaagcgtcgcaatatattgtatacatccctgaaccggaaggcaatactagaattggtgttgaagtcaatgtttccttgagcttctgaaatctcgcctcacactcgtcggaccatcagaacggggcattcttctgagtaaatctagtcaatggggctgcaacagaagaaaacccctccacaaatcggcaataatagcctgctaggcccaagaagctcctgatctctgtagctgaagtaggacggggccaaatatgaaatgcctcaatcttctggggatcaaccttgataccgtctccggataccacatgtcccaagaatgccatggaatccaaccaaacctcacacttggagaacttagcatatagcttctgttctcgcaaagtctggagcaaaactctcaaatgctcctcgtgctcccccaggctacgtgagtaaatcaagatgtcatcaatgaagacgatggtgaaggaatcaatatacggcctgaacaccttgttcatcaagtccatgaatgctgctggggcattagtcaagccaaaggacatcaccaggaggaactcatagtggccatacctcgtacaaaaagcagtcttcggaacatctgaggcccgaatcttcagctagtgataccccgatctcatatcaatcttagaaaacacccgagcaccctgcaactggttaaacaaatcatcgatgctcggcaaaagatacttgttcttaatggtgaccttgttaaactggcagtaatcaatacacatccgcatagacccatccttcttctgcacaaataggactggagcaccccacgacgatacactcggtctgataaaccccttagctaacaactcctcaagctgctccttcggagccatacggtacgaaggaatagatataggctgtgtacctagagctatatcaatgcagaaatcaatatcacgatccggaggcatgcccggaaggtccgaaggaaatacatcagcaaactctcgaacaactggcactgaatcaatcatcggagactcggcggtggtgtcccgcacataagcaaaataggccatacaccccttctcgaccatatgtcgagccttcaggaataaaacaacccggctggctgcactaactaaggaacctctacactccagcctaggcgactcgagcatggctaaagtaactgtcttagaatggaaatctagcacggcatgataaggagataaccaatccatacctaaaataaccttgaaatcaaccatgtcgagcaatagaaggtccgctctggtctcgaacccacagaaggtgatcacacaagaccgatatatccgatctaccaccacagagtcgcccacaggagtggacacatataggagaacccaaggactcacgaggaacatccaagaaaccaacaaataaggttgacacatatgaataagtggatcctggatcaaatagcattgatgcctccccaccacatactgaaatagtacttgtgatcacggcgtctgaggccactgcatatgctcgggccagaatagcatagaatttggctggagcaccagaaggctgacctcagctggaacgaataggagctggcagagatccccttgcctagcctccacctctggggtgacccctaccagtctatcctccacccctgggtggacgtggagccggtgttgagtatgcaggctgataactctgctgaacagcctttccccgaagcctgggacaagtcctcctcatatggcctgaatccatacactcataacatctcactggtggcatggcctgctgccctgaagaataaccctagatagatgggggacgatgagaaccctatggcatggcactgaagtaaggactagaagacccctgatgatcggaatacctaccatagtaaccccgaatggctggtgggtggtaagaactctccggcatggcgctgaaataaggcctcactggagcaccacggggaggtgatagaggagctgaatatggaggccttctaggctggcctctgctgaactgaccctgcccttgcctggggcatctctgaaatctctagaaaatctaactctcttgtcctgctgaccctactctctgccccttgatcgataaccctcaatccgacgagctatctcgaccacaagctgatagggagtacccatatccacctctcgggccatgttggccctaatacctaagtgcaatccagccacaaatctccacactctctcaacgtcagtaggaagtatcataagggcatggagcgacaactcagaaaaccaggcctcatagtctgtcacaaacatctgcccctgctacagctgctcaaactgataccgcagctcttccctctcagagggtggaatatatctgtctagaaacaactgagtgaactgctcccaagtgatagaaggggaacctgttggtctacccaggatatatgacttccaccatctgcgagccctaccctctagctgaaaagtagtgaaatccactccatgggactccagtatcctcatgttgtgcagtctatccctgcacctgtcaatgaaatcctgggcgtcctcgcctcgctcacccccgaagactggagggtgcaatcgagtccatctatacaataacttctacggatcaccgtccgcagctggtctgagctcaggtgcttctgttgtaggctgggctccacccacgggcagtgtacccagggtatgatatcatgaccctcccgcctgagaagtggcaggatctactggaaataacttctgcggatagtcgtccgcagctggtctgagctcaggtgttgctgttgtaggctgggctccacccacgaacagtgtacccggggtatgatgtaatgtctctcccgcttgagaagtggcaggatctgctagaaataaaccagcttgggacatagtgtccataaatctcatcatacggcccatgacctcccgaaagcctggcaccatcatgaagtccactggagcaggatatgttgggggcacctcgtcttgctcctcaatgataggatcctctaatggtggtgcaactagaacagctttgggatgccctcaccccctacctcgggccggtgctctcccccggcctctgccacggcctctaacaacgggggtagcagcccctcccgggtctggaacatcggatgcgcgcgtcctcaccatctgtgagagaatagaaggatgagtttttgtataccatcgactgcacgatagaatatgaataaagagagatttcttaacaccctatagcctcccgaagataaatacagacgtttccgtatcgatccgcaggactctactaggttttcccgtgacttgtgagacctacgtgaacttggagctctgatacaatgttgtcacgacccaaaatcctaatttatgtcgtgatggcgcccaacgtcgaggtcaggcaagccaacactcgtgttactaacgagatttccttatttgataaattgttccaagacttgccaaattttaagattaaggaattgtaaggtgagaacagataacttgtccaactcatatcaacataccataaaggaccgtaaataacatatacagtgccaaaatataatatctactacgtgtgccaggacctagtgtcacaagtctacgggcggactagtgaaatatacaaaatacgataaaatattgtgctactgtcaaaaggaaatggacagaaatagaaaaagataactcccaagtgctgttgagaatcgccaagggggaaacatctaaccgtggagtcgattatagagtatgctctcaagatcgcgctccggtcagataaccagatgcacctgcctcagaacctctacaattaagtacagaagtgtagcatgagtacatataaacaaatatgtacccagtgagtatcccgtctaatctcgaagaagtagtgacgagaggtcgacgtgatacttactagggtcaagatgtaataatataagtgaatgaagactaggcagggatagcagttccaaaaatcacaagacatgaaaatatcaagtataaatttacaatttacctctgcgtgtcaaatcacactagtaataagtaaactaacttttccttttcacatgaagcagtttatatgataacaacaagactctcagtcaaaacatcacatagtatgccgaagcgtacggccgaagcgtacggccgaagcgtcgtgaaaataaatgtgcattggcgagggtcgaacagctcgaaccatagatgcatctattaccccgctcacgaatcgaacatgcgactcggttgacataataataaggctaccccgctcgcgaatcatacatgcgacatgggtgctcgtatacatacacagaattatcaggaaatccagaaattcaatagagattattcttgcaaacaagaacttaagcatctgaaatattgaacgtaacttcctaatattctcatgctaattcaagggtaataaacaactcaaaatacatttaggggtacatgtaaggcacataaaagcatgctcgtgagtcctaacactacccgacatggcataatagtagctacgcacggactctcgtcactttgtgtgtgtgtagcccccacaaataaggacatttaaatcatgattacctatggggacaattccctcttacaaggttagaaaggagactcacctcgtgtcgaatctacttcttggaccaagaacgctcccgaaactccgaactctacactcgaggactcgaaactagccaaatgttatgcaaatatatcaattcacgctcaaagtatggaaattatcctacttatttagtaaatttatcattcttgaagaaatcccaaaattcacccccgggcccgcacgcttggatttcgaaaatttacgaaggattcacccataacctaaggatcatcaatatgtgatttttacttgatttcatggctaattaacgggtaattcctcaaattctcgaatgccctaggttactacccaattccttgattttcactaattaggtagttaatttaactaggaattcatgtattaaactaacactagggtagaacttacttacctcttagtagctaggtcgtgggtctcttttccaagctctcaaggtctctaatggaggaaagaaaatggagaaaatgaacttttcccgtgtttaaaagaacacacttccgacagtggtgttggcccataccattgaatgggttttgaagattgacaacatgtgtccagttgaaccaggtccatcatagcacacacttctaaagcatggatcacaaatggtacaaatctaggaggtattagagttatcaaagaactaagagaatgtctcctaatacaaaaaggttgcaaattgatagagaagacagaagttgatttcagttaggacaggaatagaggaaggaagttgagttacaatcaaacttgtctaccaaggaagagttggatcataattgtatcatggactcaaccaacggcctctataaataatcaaagtattactgctgaaaaagacgacgcacaagtacaaaagtgaatcaagttctgaagcaaaagttccagaggttttgcaaggagaattgttgtgcgatacaaaggctacagttcaactataaggaacagtttcattgtctgtatatcgagtctagttgattgtagtaggagtttaaatattgtatcttatcaactttattagaagcaaattgtaataggtacaaattgatcaagttagagttagcttgaattctgtagaaattagctagaggctagttgatacaaagaggattagagttagtcctaggattacaaaagagtttattttgtaagtctgttttggctcagtgtttagtgaagagcttgagcaaatcctattgaggagtaggtcgtggttttttcaccttttaagccaggtgttttctacgtaaaaatcccagtgtctttactattactacttaattattccgcaaattgtagttagtaatagactaagaagaacctggttcttcttattagacagcactcgaaaattgggtactgcacaattaacttataatattgtgtagtattgaagtctaaaacatcaatcggtatcagagcaggttatccttgaagaggctaacacctaggaaaagatcaagatgagtgcaccacctgggaactgggaaggataatcaactgcaagaccaccactcttcaacggctagtactattcttagtggaagaatagaatgaaggatcaccttattggagaagactatgaactctgggacatagtcactgatggaccgcttgcagcaatgaagaaaactgttgaaggagtagatgtacctaaaactagggctgactgcacggctgaggatctgaagaaatgggagaagaatgccaaggctaagaagtggctagtgtgtggactaggcccagatgaatacagcagaatccaaagttgtaccactgcaaaggaaatctgggatactctacaagtggcacatgaaggaacagctcaagtgaagatgtctagaggtacgttgctatactctcagcatgaaaacttcactatgaagaaaggtgaaacaattcaggagatgtacacaaggttcacaaccttaactcatgaactcaagtctcttggaagagttatccttgaaaacgacaaggttgagaagatcgtgacaagggttctgcctatctcctgggaaagcaagataactgccattcaggaatccaaaaatatggcaacccttagactagatgagttgattggcaaccttactgcttatgaactcagaaggcaaaccatgaaaatggatgccctaaataaagaaagaagtctagcactaaggatcacggagggagcagatctggaggatgatgagatggccatgatcaccaaagaattcagaaactttctcatgaggaagaaaggcatctctagagggggaaacttcaacaaggcaaaggctcctaaaaggccagctaatgagggatgctacaagtgtggaaaaactgatcatctcatcaagaactgccctcagtgggaagtagaatggaggaaggagagatatgaaagaaagaataggaagaaggaactggtccaacccaagaaaactactacaaaggctatggttgctgcttggggggaaagttcagatgaagaatcagaagatgatgagacagaagatcaagatctcatgttaatgggagactctgataaggagaattatgaagaaccacaggtaagtatctcacatcttaaaacaaaaataaagtttatatctaaggagaaactctctgagttgctacttgacttcattgatgattctaaggagaactctaaagagaaagatcaattatctaaagagtgtgcaatgctgagagcaaaatgcatggacctggaaataagactcagtgaatttgaaaagaaaaccactgtcttgatgaaccaggttcaaccactcgaaactaagattctagaactaaaatctgaaaatttaaagttaagactaggatccagtaaacaaattgttgatcactctcatacgaagctataagaagacttaggtaaattgaaataaaatgtatgccaaagatgagcagataaagtctcttaaagaagaacttggcaaagtcaaacatgaatttgatagaacacgtaagtggaataagtcttctgatgctttaatatggctccaagagaatcatagtagcaaccggagagggcttggtttggggagtcaattgcctaaatgggatcccaaaagcaagtatctcactctccctgaaaataaaatttgcacccattgtgggaagactggccactctaaatatgagtgttctgcaaaagaaaaggccagtcagaaaaatgagagattcattaaaaagaaaaataggctaccaaattgggccagaaaaaatctgattcatccattctctcatggaaagggacccaaactagtttgggttcttaaaactaacccctgatttcttttgaaggtacaagtgaagggagacagccagttttggttcttggatagtggttgttctaagcatatgacagggaacaaggaacagctcctttcacttgaaaacctcaaaggagaaaatgtctccgtggaaacggaaagaaaggtgaaataataggggtcggcaaggtaggtaaagatgacacatgatcaattgaacatgtgtatctgatagatggcttgaaatatagccttatcagtgtgtcacaactgtgtgacagaggtaaccttgtcgcttttacttccacaaaatgttttgtgatcaacctgcttactgacaagattgttttgcaggggaaaagaatgaacaatatctatgtcattgacttgtccacactgtttgacaatgaactcacttgccttagtgtgttggacagtgatcccctcctgtggcacaaaagacttggtcatgcaagtctaactcaacttaacaagctggtctctaaggacttagtggtagggcttcctaacattaagttcaaagaagacaaggtttgtggggcatgttcaagggggaagcaggtaagttcttctttcaaaagtaagaaaatggccagtaccaccaggtcgttggaactggttcatatagatatttgtggtcccatgagaactttaagtagaggtggaaagagatatgttatggtactagtagatgatttctcaaggttcacttggaccttgttcttgacatctaaggatgaagcatttgaaatgttcacctcatttgtcaagaagattcagaatcaactaagacatcaactagcatccattagatctgaccatggtactgagtttgagaatgctaagtttgctgagttctgtgatgaacatggtgtgaatcacatttttttctgctcctagaaccccacagcaaaatgggtttgttgaaaggaaaaacagaactcttgaagacatggcaagaaccatgcttctatcaagcaaactacctcacagcttctgggtagaagcaactaacactgcatgttacattatcaatagatgcatgaccagacctctggtagagaaaactccctatgaattacttaaagggagaaagcccaacatatcccatcttagggcttttggatacaagtgttatgtgcataataatggcaaagattctttaggaaaatttgatcccagaagtgatgagggagtgttcttgggatattctacacatagaaaagcttataaaatatataataaaagaactatgtgtgtggaagaaagtgtacatgttgtctttgatgaaactaacactttatctaagagacaggaaccagaagatgaggagcttggactggtgaggagcaatgactacattgaagcacccatgggagatggaacaggtccaaaaaccccacgcaacttgatagggggaatctcacatgaaaatactggtcctgatcctgttccactgcaacaagacaacttggaataatccagaagtgaacaactggcactcaaatcacacagatattagagttctcaccctcttgagaacatcataacagacctgagatctggaatcaaaactagatcctccttgaaaaatctgtgtgcgtttgatgcattcctatccatgattgaactaaagaacattacttaagccctgaaagatgctgactggataactgctatgcaagaagaactgaatcaattataaagaagtcaagtatggcacttggtacccagaccacttgacagatcaataattggcaccaagtgggtcttcaggaataaactcgatgaggatggaactgttactagaaacaaggcaagactggttgttcaaggataaagccaagaagagggaatagattatgatgagaccttttctcctgtggcaagattggaagcaatcagacttcttatagcattagttgcacacatggaattcattttgcatcagatggatgtaaagagtgcttttctcaatggctatttgaaggaagaagtatttgtaagacaacctcctggcttggaaaacaaagaatcacatgatcatgtatataaacttgaaaaggctctctatggtctcaagcaagcacctagatcctggtacgagagattgccaaaattcctgctggaacacgggtacaaacgaggcaaaatagacagtactttgttcttaaaggaaaagggaaaagatcttctgattgtacaaatttatgttgatgatatcatatttggggaaacaactgagaagctcagcaaggaatttgctacactaatggggagtgagtttgaaatgagtatgatgggtgaactaacctttttcttaggtctacaaatcaaacaaactccgcatggaacaatgattcatcagcaaaagtatgtgagagaactcctcaagaagttcaaaatggaagattcaaaggagatagataccccaatcgccacaactacaaaattagatgtggataaacctggttcatccgttgatcacaagacgtacagagggatgattggatctctactatatcttactgcaagtagacctgatatcgtgttcagtgtgggactatgtgctaggtttcaagtcaatccaaaggagtcacatctcactgcagtgaagagaatcttgagatatttgaagggcactactgatttgtgcctttggtatcctaaaggtagtaattttgaccttgtaggatatgttgatgctgattatgcaggtttcctagttgacaggaaaagtacttcaggtatggctcactttttgggatccttccttgtatcttgggctaccaagaaacaaaattcagtagttgtctactgctgaggctgaatatgtggttgcagcctcttgttgtgctatgttgttgtggattaagcaacaactcctggactttggaatagatatgggatgcattcctatttactgtgataacactagtgctattagtatgactaagaacccggttcatcacaagagaactaagcacatagatgttaggcaccatttcctgatgaataattatgagaaggggatgaactcaattgaattatgtgccactgatcatcaaattgctgatatatttaccaaagcattaagtagggagcattatgagagaaacaggctttaattagggatgattaagatcacctattggaaaaaaaaaaaggagaaagttctatggctagaaatttgaattagggtacttaaacagtttaatcattgcttagcactatgtctttgttgtcatactcttctgccatgtattaatatggttccctaattgttaatgatgtttctctatttgtgaattgaggcaaaataaagtttttttcaatatgaacctggttcatccatgctggttcacataactgacaaggtacgttttcatctccatacatgtattaattcaactacagtcatacatgggtaggattctatccttttatggttcagttcaaattcttgtacttacccaaaatgaaccagtttcaaaaagttcagtctccttaaattagcctagttttagggggaaagaaacggtctaatcaatgtcaaatcattgacagtccttaatcgattagtatcctacttgtgttaatactcgtccattacaattaccccagccacaagttataaataggccatcattaccaatagtgaataaagctctagacgaaccctgttcaagtcattcaacatacaaatctccactatcttttgccctttcttccttttctctcaaaaattaaacatgtcgtctgcttcatctgattctcaaaatcgtgactacgatgaaggagtatatgagtctgattccccaccgatatatagttctgaatcctctaagacacctgaaacccctgaatactatgaggctcttataactacaccaaaccctattccagccccaaaaccccgtcgtgtcaaggtacttgcacgaaaatctgtggcttcagggtcacaagcaaatttcttggaagatctattacaggctgaagaagaacctaaacctgattcatccagtgaatcatttaaatcagcacaagaggacgatgaacctggttcatcaagtgttgagaaaggtaatactgatgttacctctgtgttaaattctgaaaatagatttgtgttggttgggtctgtggtggatgtggaagtgccaagaaggcccagaaaaactgggaaaattagtgagaatgagggagatgcaggtgtgaggggttctgggaaggatggttccatactcagtatttatggccccattcttgataatcttgaagatgatgtcgtagttttaggggggaactaatgaagtggaggatgctgctgcaggattagaacaacttatgaaggagatcgatgatcatgtttcttctggggaagaaaccttggctgaaagacttaagaaattggggaactcatacaaccccaagaagagaaggactcccaagttcattaagtctaaggcctcaaagaagaggaaaactgatgagtctgttggtgtacctgttccaagggtacgagctatgagaaatactgttcgtgaagaagagaaaaagctagaaaaagctcttaaagagagcaaaagaaagagaactgagaaagggaaagcaaaagtaggggagcatgttgaggctattgttgttgatgagatgttggacctggtccaacagaatgaagaggttactccagtggtggtcaatacacccaaagaaaaattgactaagacttcctcaaaaaagtcagcacctatgtctgctaccaccctgggtacatctacaaggacacggtccaaggtaaagtcgaagaagaaagttcagattgttgagaaagataatgatcctgactggagtggtgatgatgagaaggaggttggagaagtgtcgatggacagagttgccatgtttggcaagcggcatattttgaaaggaaaatcgttaaaagacctggaggagccaggtatgaggcacttagtggattttctggcggctcaaggctggaaggacatggtccttcgcttggagggcaggctagtcagaaatgaagtagtggaattcatggggaatgcaactgtgattggaggaagggttacatcattggttaggggagttgaagtctcttttgacgcacaagaactaggagtcattctagacattccatctgaggaatatgatgattatacaaggcagagatggcctagcttggatggaatggcctcagcacttaccatcaccagattcttttatgacaatgaagaagagcctgaacccagggtagtgtacaaaagcgagatgaagcctgaacacaagttgttctttgaatttgtgattaaatttctgctgccaagacaagagcgcaggcacattgccaactatatggatctaacgctcatggaatgcttatatagaggcaagcagatcaattggccatctttgatcatccagcttttggacagggtggtaaatgacaccaaggcccatgcgattccttatggatttatacttactgcagttctgggtcattttggagttcccacaaagaaggctgaaatggctactgctaaggatttctttgggaaggacacttttttgtcttgtgattacactgtcagtgccccggcagataaacctggttcatctcggaagcaaccggttaatagcaaggttcgtactctggtgcaagaaagtgagcaaaaggatatggagatccttcgcttgaagactcgcttagttgaggtagaaggtgagcgtgacgctctcaaagttgaattagccaaggagaaggagaaaaatgagggtgtcttacaccaaatgttgtctcttatccaaaccaagagtcctgcctcgtctgcaccaccccaaacttaggaatttccagaactcccccctcctatcctatcaagtgcccagttcgggacggtgtttagttgtttgtctcagttttttctgtcttactcatgttttgattgtctttgttttaatctattttggttttgatcaaccatgttaattaaatgaaagcttggtgttttgtaaatgtctctatttatgatttagcttacatttttggtttcttgtgttgattaatcatgttgcacctgcagttgcctaaattgtccatgagtaagaattaattactagtgagtatcactttgcaactttttgatgatgccaaaagggggaagatgtgctctagttattggtttcaattttgacaaatttttgaaggtgatatttataacctaataaacctggttcttgatgattaatgctcacaaaaatacaaagtgttggatgtgtatataggacaaatgcacagagtttgtcatcatcaaaaagggggaatttgttggcccatatcactgaatgggttttgaagattgacaacatgtgtccagttgaaccaggtccatcatagcacacacttcaatatgaagcagttggatcgcaaatcgtacaaatccaggagatattagagtttgctaaatatcaaagaactaagagaatgtctcctaatacaaaaaggttgcaaattgatagagaagacagaagttgattttagctaggacaggaatagaggaaggaagttgagttacaatcaaacttgtctaccaaagaagagttggatcagaattgtatcatggactcaaccaacggcctctataaataatcaaagtattactgctgaaagagacgacgcacaagtacaaaagtgaatcgagttctgaagcaaaagttccagaggttttgcaagcagaattgttgtgcgatacaaaggctacggttcaactagaaggaacagtttcattgtctgtatatcgagtctagttgattctagtaggagtttaaatgttgtatcttatcagctttattagaagcaaattgtaataggtacaaattgatcaagttagagttggcttgaattctgtagaaattagctagaggctagttgatacaaagaggattagagttagtcctaggattacaaaagagtttattttgtaagtccgttttggctcagtgtttagtgaagagtttgagcaaatcctactgaggagtaggtcgtggttttttcaccttttgagccaggtgttttccacgtaaaaatccatgtgtctttactattactgcttaattattccgcaaattgtagttagtaatagactaagaagaaccaggtttttcttattagacagcactcgaaaattggatactgcacaattaacttataatattgtgtagtattgaagtctaaaacatcaagtggttccgcacttgcggctcaaggacattacatgtggtctcgcacctgcggaaatggacaagagggcctgggctcgcacctgcggagaggagctcgcacatgcggctccgctcctgcggaatattgtccgcacctgcgaagatgggcagcctcacctggggccgcacctgcgaggcctgagactgcacgagcgatcccgcacctgcgactggggaaccgcacctgcggtcacactagaacaggtgcaccagcaattgtttcagctggttgttagcctcgtatggtgcccgagaggcacctgggcccacccgagcccccgtccaaatataccaacaagtcccaaatcataatgcggactcgctcaagccttcggaacacccaaaataacgctaaaactgaaatatcacccctccaaacccctaaagaacaaacttaagaacttcaagttcttgaattcggtatcgatgcgccgaaccgacctatactactcagaatgacaccaaattttgtgagcaattcataaatgacataacggaactattcccgatctcgaaattttgttcggtactcgataacaccaaaacacattccaaaccaaatttcaaacttaagtaaactcttattttgatattgggcgccgaaatgctctcgggtcatccaaaacccattccgaacatacgcccaagtccgaaatcatcatacgaagctgccaaaactggcagatctaaattccgaggtcatttactcaaaatattgaccgaagtcaaacttggccaaaaaggccaaccttaaggaactaagtgttcctataccactcaaaacactttcgaatcccgaaccacccgtccccgcaagtcataaatcacaataagccgctacgagaagtttcatttaggggaacggggttcgataacgcaaaacgaccgatcgggtcgttacaggtgttataattattttatggcccaaattcatgtccaagaagaggtgtattacatcccaagaaacatcctctgaagaaggtccaaatcaggctactgttgaaccaatttggcatctaaaacgtgttcaaacttgcagcccataaagtactacataaagccacgtttttatatcataaaaaggacttacttaatgtccaagaagggtacaatagtcgtgctagatgttgagtgaaagttgggccaagttgcttgcagatttccttcaagatttccaaaatttgcaagatttatccaagattggtttgggacttattttcatttatattcggactatagttattgttttcctagttagttaagtttatgttttccttttactaagatttttggaattactttccaagaatgacttggtttttgcttcctggtattttcctttcctaaggcagttggggcttttgcatctatacccgctttttgggtcatgttttaacttatacccgctttgcaaaaaacttacaagtgtacccacgtttcgcataaacttcaggcatacgggcctgaagtaacaaaggcaatcacaaaaatttcagcattctaggctttttgaaaaacttcagcagaagatgttgaagttatttagttcatttgtaaaaacttcagtactaaataagctgaagttttgtcctagattaattagttttgtcatatagctttttcaaaaacttcagcagaacacgctgaagttatttagttcatttctaaaaacttcagcattaaataagctgatgttttgccttggattaattagttttgtcataaagcgttttcaaaaacttcaacagaagatgctgaagttatttagtttatttgtaaaaacttcagcactaaataagctgaagttttgttttgcaataaagcttattcaaaaacttcagcagaagtgctgaagttatttagttcatttgtaaaaacttcagcactaaataagctgaagttttgtcctggattaattagttttgtcataaatctttttcaaaaatttcagcagaagatgctgaagttatttagtttatttgtaaaacttcagcactaaataagttgaagtattgttttgcaataaagcttattaaaaaattcagcagaagtgctgaagttatttagttcatttgtaaaaacttcagcactaaaataagttgaagttttgcgccggtagcaagaagaaggaggcacctgaagttgtaaaaattagggtataggttaaataattttaaaacaaatgggtataggttaaatgggggcgacaaatagggcaccccgtgcaatttctacaaggcagctggacttgttgtccaaagtagtttaggactttatttccttattttttcaggtacaatttcgtgaccccctccctatataaaggttgtcttatttgtttttagagatattattatagacaatatcaataaagtttgtgagatttttcttgcatccttgtgtgtggctactcttggatttattcttcaaccttcaagacttaacttaagatggaaagattaaaccctttttgagatcttagatcacttctaggtattcaagaattgtgataagtttaggcttattgttgttcttgttattttaaagggtcgggttttactatctatttcttgtttttaagtctctaccacatgcgattagtttttcgttagctagttgttgttgttaggattctacttcaagaatagacttcttaaattcaagaaactctttcttgaattcaatctacctttaatttccgttttcttttttgtttctttatttttcttttaacttccgcacgtttcttgattttctttagtagttctcggacccctatcgtgttgtcatcataagtgcaagaaaatttattatttaaaataatctttaaattctcttattgatactcatttgagttttctataattcgtctcatcataattgattcaagatgtcccgatcgatcatgccaaattacaaaaatattaaaatcagtaaccttttggtttacaatagaatatgcctctttgcactcatttttatccaatacaggccacaagacaaagatgggaacttctcaatagcccttttctagctagagacattcttggaaatgatgagatattcaaggttattctcatctattgtctcaatatgatatccatttcggcggatatctttaaaactcaacaagttcctcctggatttggaggagaatatatacatatttaaataagagaaaatttcttctctttgaatattgatgtgtcgtacatgaatcaattaaacaaatatttttacaaaattgaactttgatccaagtttgctctgtgagatattcatattttcttcacatagtttgacatacaaaaagaaatataagaataaacattagtatttttcagagaaaagggaaaaagaaaacaaaattaaaccaatgattcaataaataccgttaatgcaatttcgagccaacctggttatgatacaaacaattcggtttatttttcgaagtactagtctatctattacaaacggttatacataatctatattatattaaaaggagagtagtgaagcatgtggttaagccaagtggcaagctaaaagaagccacttggcaattttaagacaacattaaaaatttgaattataaatggaaacataattaatgaaagtagtttaatatatgttatactcaatctaaataaatcttagacaaatctaatctatatatcaatatttaaatgtatatttatatgtatattaatagttatatctatatttatatctatattgattcacctatagattttttatctatattagctagaaatattgaggtaaaaaattaactaaaagttataatagaaaaaatttaaaaaaaatgtaaaaagacgtaaattgagataactgtgactatctatactttggagtaagttaaaacaaaatttaaaaaaaattaagatattaaaaatttattaagttttaaaaattaaataaattcaagcggaaaaataagatcttacataaagtatataaattatttataaggtaagaaaaaacgtagataatcagtaaaaactattttactaacaagaataataatgtcatatttttttgggtcaaattaaaaaacttttattcaaccaagtatgcatatttatagccttagctctatttggactcgagagctatttcctctatctctatctagctaaaattatagctattacaatcataggctaggataactatttagactttctaaaatcttcttccatttggtataactttgtcctctaatgtgcagttggaggctaattttcttaaatctctgatgactccttttctcttcatcttgaaaccttcttgcattcctttcactcaaaacatggtacaatattgcagcaaataaccatgacatgatctgacttttaatactgcttcttctgcatctatttgccatccattgtatttcctcattccatgtcttgatgaccctatcttcatgcatccattttagtagggaactccaaattccttttgcatagttgcattcaaagaacaagtgttccatagattatgtacttcccatattacacagcacacattcttgtggcacacttacattccattttgctagtctgtcaactgtcgcgagcctttgccttatagctagccataagataaactgttgtcgaggaatttgacttgcctccatagtgagatttctgcactgcactttctgatattgtggttgaaaggataggtaagctgtcttaatgttgaatttgttccctttgctgcattttcccaactcagcctgaaatttgctattaaaccacttcctagcatcgaagattttcctcacaagccatcttgcttgtgcaggtgtcttcatagtttctagttccttattcttgatatagtatccatggatccattgcacccataatgactcctttcttgtggatattgcccataacagtttgcatatggatgctttgttccacactgtgaaatccataatctctaacccacctgttgatcttggcatacacaacgattcctaggaaactagagcttttcttgatgcttcatgacttctagtccaaaggaatgttctgcatatacttgtgataagttgaataaccttcttgggtagaacaaatatctgatcccaatatatctgcatctcaaagagcacactcttgactctactagacttgctcatgactcgtgagacctaaaggaacctagtgctctgataccatgttgtcacgacccaaaatccataaggtcgtgatggcgccggacaccactgtcaggcaggccaatcattaattagttgaaataaattcttgttttaacatttttgaaatcgttacctttcactttaatacatgataactagataaaaatccattaagtaaaagcaacagtctatttttccaatttaataaaaatacaacccaattacatcctagaacccggtgtcaaaagtacatgagcaatttctaagactttttcaaaatgctacaaagcttgtccgaatacaagttggacaaggactttagaataaaataaatacagtacatagaggaagactctgccggctgcggatcgcctccggatgatgcagctcacctaagtctccaaaccagccccatcgctatgaaagtgcatgtgcaacaaaatgcacagcaagtgtagcatgagtacgaaaacaatgtgtactcagtaagtatcatgcataacctcaaagaggtagtgacgagaggtcgacttgacactcactagggtccaacaatgtaatttaacaatatatgacaacagcaaaaggcacatgagggtaataaaatcagtaaactttaaaagtaactgcaattcaataaacactggaagtaaatacataatttctacttcatttttcccccaaatatctgtcaagtcattatccatgaaatcatttaacaatttaggtccttaagacaatttaacaattcaagtcacaagtggtatatcatatgtatatatatgtgtaggaaatgctgagggtcgttcggcccgaaccaacaataaaagtaaacggtgcactgcagagggtcgaacggcccgaaccataagtgcatcttttcactaaaataatcatatatatgcactgccgagggtcgaacggcccgaaccataagtgcatctttcaatctgtcgtggcgtacggccctctgtgatgacccaaaaggtcatgctaagtaattctagctaaatctgtgttccgagaccccgaaagcctctgttaatctcacctcgtgcgtgcgcagcccgagcatgtagcaaggaagcttctatgtgaaaatttgattaaaatggagttttgaatgaaataattgaataaagttgactttggtcaacatttttggtaaacggatccggaccagtgatgtgacagtcccgaagggtcagtaggaaaatagggacttgggcgtatgcccggaatcgaatttcgaggtcccaagcccgagaaatgaatttttaaagaaaattgttttctgaaaataataaagatttttgaaaatgaactttgatgtgaaaaccgcgttaccgggctcgtattatggttccgaggaccggaacaagtttattatatgttatgtgacttatctgtgaaatttggtgtaaaacggacttgagatgacgtgattcggattaaaaatgggaaatttagaagtttatgaagtttgagaaaattctatgagttttaaggtttaatttgataattttgatgatattttggtggtttaaatgcttgaacaagtccgtaggatgtattgggagatgtgtgtgtttttggttttgagacccgagggctcgggtgagtttcgggtagctaacggggtgtaaaaagatgggaaaaatctggtgtttctcccttttctggtgtcaggcctttctttcagtgcgatcgcatatgcatatctgcgatcgcacaacattaggttggtaggggaaaagtttactctatgcgatcgcatagagttgtccgcgatcgcatagtgggtaggtgtgatagggtgggagctgggtagttactcagtgcgatcgcactgcccttgtccgcgatcgcagtagtataggtcaaggcttcactgcggtcgcagcccttgtcctgcgatcgcacttcacaggatccctgactctatgcgatcgcacacccttttccgcgatcgcatagagttatttcgcccagctatacttttaaaccccaaaacagaattcaatacgggaattcctaaatttcagtcttctcctccatcctcaacctccattgacgagcctcaagctaacttccctccatatacacttgggtaagtgattttaacatttatttcttcccctttcctttcctaatcactagaatctaggcctaaaaacatgaaatcaaagtgggaaagtgggtttttgggtagtgttaggtttttgggaaaattgggtgattcaacctcaatttggggtcggatcttaaaactaattacatatttgaactcgtggggtaatgggtgaacgggttttggtccgaacctcgagtttagaccacgtgggcccggggtcgaattttgggaattttgaaagaaaggtaggaattgtgtatttaggctatgggatggtgttattgagttattattgatacacttaaattaattatgcttagatattgtggttccggagttgaattcaaaaggaaaagcgatcttagagggttaattgctatactttggaccgaggtaagtgtcttgtctaactttggtgagggaataggtattaattgctacgtgctaagtgattatcatgttcattgcataggtgaggtgacgagtacctatgcaatgtgtgtcaagcatgcccgtgagtctattttgatagaaattgcagtatttcttccatgtttagcatattatgagattgtctttacttggtaagttattcttgattgaaagtattggttgtggagtttgagaagtgttgatacgaatggtaatacaagtgaagagtacgtgattgaggtaattagttatagctgagacccttgccgggcattttttgagctactagttgatgtttcccccttgtcgggtgttttgaactgcttatttccactatgatgtactccttgccatgttatctgttattgtttggtgaggaagagtgtaaagcacgaagggtgatgtcgtgtcatgatatttgattacattgcatagtgaggaagagtgtaaagcacgaagggtgatgccgtgccatgattcatattgattataagcacgaaggtaaatgtcgtgccatgacttttattgattataagcacgaaggttaatgtcgtgtcatgatacattgtacattgcattgtgaggaagagagtaaaagcactaagggtgatgccgtgccatgatatttgattacattgcatggtgaggaagagagtaaaagcacgaagggtgatgtcgtgccattgtttacttttctgacatttatacttgtttcgctatcgattatgttggattgtttctctggatcacttctatctgtcgatgtgactgctttatttcacttgccccccctcccccttttctgctcccgtatcccctacttgtcggcttatctcctgccttgtgttatttcctgttacctgctgtagaataggacaagttatcgttaatgtcaagtctagcctcgtcactacttcggccgaggttaggctcggcacttactcaatacatggggtcggttgtactgatactacactgcacttcttaatgttgtgcagatcccgcatctgaacccagtggaccacgttgagggagtcaccttcagtccacccagagcttcaaggtatacccgctggcgttcgtgggccttggtgtctctcctacatttggatttcctcattgtcttgcccttttcttctagttccaagacaattatatatttcttccagactttgtatttagcactcggttagttagttcgtgaggttgtgacaccccggttttgggattgatcgttgttgttgtcttatcatttcattatgagttttgttgaagtaatattattattttttgatgtgaaacattgaagtgatttgggatgttcagtaaaaaaaaatcgagagctaatggtgtgggatattttcggaaaaggttggacattaatgaattcgagttatttcagtaaatgtttgaaggttaatagttttaaatactgttacgttgtgttattaaggcaataatgttgtatacgttggcttgtctagcgggttcaacgttagacgcagtcacggcctgaaaggagggatttcgggtcgtgacaccctctcccatgagagtgggggaaataacactccgctcgcggaatgttaattgtgaagcggtcacatgcacatacaatattttcttaaattactttcaataaacaattcctttaaattaccaatttctgtgatcttagggaaaaccaaagtttcataaatcataatttcataaagcatataatccattcctagaaagaacacaaggcatgatgtgggtcctagactacccggacatggcataacagtagctacgcacagactcccgtcacctcgtgcgtacgtatcccccacaaacaatagtatatattcatttagttcacctatggggacaattccccctcacaaagttaaaaaggagacttacctcgtgtcgaacctactttccgggccaagaatgcgcccgaaactccgaactcgtcttccaaggacttgaaactagacacaagttacttaattatatcaataaatgctaaatgaatcaattctaatgcatggaagtgagttttctaaagtctttccccaaaagtcaaaaattgaacccgggcccactcggtctaaacccgaaattcggaccaacacccgattacccattcgctcccgagcccggatatataaatggttttggaatccgacctcaatttgaggtctaaatccccaaatttcaatattcttaggttttacccaaaattcccaattccaccatgaaaaccctagattctaggatgaaatcttgtaaaaagaagttaaggagtgaagaaaaatgagttagaaatcacttacaaatgttttggagaagaaagagtgtttgaaaaatcgcctcttatgtttttggggtcttgaaaaatgaaaaataactgaaaatccacttatttatactcctctcagccccccctccacccacccaccgcggtccgcaaaaaaaaggaccgcggccgcgctagcaaaaatcaagaaaaactgaagaaaatcaagaaaaatgactacagtgacatgctttaatattttggccataactttctctatagatgtccaaatcacgattgttttacctttctagaaactagacactaaggaatacaacttttgtttttgaatcatctctacattccttgtagatcaaaagatataagcctcttaagtcggaccagtggctcagctcctccaccgcggaccgcgaaaatacgaccgcggccgcaaagccctccaccgcggccaacacaaaaaggatcgcggaccgcggtggtgggttcagagatttgaaccctctgacctgaaacaggtatattttagcctaaagacatcccgcgacctacccgtaactcacccgagccctcggaacttcaaaccgaatgttccaacaagtaccaaatcatcccacggacttgcacgagccttcggaacacccaaaataacgctaaaactcagaatcacacctcaaaacccctagaatcaaacttttgaattcgttaacaatgtgtcgaaccgacctatactactcgaaatgataccaaattttgcaagcaagtcatattcgatattacggacctgctcaaacttccggaatcaccttccgaccccgatatcaaaattttcacttccggtcggattcttcaaaaacatccaaatttctatctttagccaaatgacttcaaaatgacctccggacatccgagttcactttcgatcgcgctcccaactccagaatcaccatacgaagttattcccagcctcgggatcccaaacaaacatcaatatcactgaaatgcgcttcaagccaaacttaggaaattccttcaaaaatgctgacttccacaatatacgccgaaacgctcccgggttatccaaaacccgattcggacatacgcccaagtacgaaatcatcatacgaacctgttggaaccttcaaatcctgattccgaggtcgtttactccaaattccactcttagccgattcttccaacttaaggtttctaagatgagaattctctttccaaatccacccgaactttccaaatttcaattctgaccatgcgtacgagtcataatacctgaaatgaagttgatcatgacctcaaactgttgaacgacgcgctagagctcaaaacgaccggtcgggtcgttacacaattagactataacttatgtccccgggatccctcttgttacatcaagaatagctccaaccctttatttgaatctgccccagtcctacttcatctacacaatcctggaaatcttgtgtttcattttgctgaactggtgccccattgatcctatctgcaacagacaagatagtattgaaatctccaataacaatccatggttccactattgtgtggttgagtactctcaattgtctccacatatctttccttccttcaatggtattatatccatagacaaatgttgcataacactcaaatagtgatcatttttccttcaccttgcaatgaacagtttgagggcctgaattatgtatatcaacctctaccatatttggtttccaacatatccagattcttccattttggcatcttgcatagtcacgatacacctgccagtctactcctattttcttttttattttctctgctcttctagcctttaccttagtttctaggcagcccaatagagctactttatttgtatgcaagaaggacctaaattccttctgcttatagggtttattcagccccctgatgttccatgatccaaaaatcatggaggttgtttgttcaaactggtaccccttaccacattgtttgtggtaacctcttcttgaattctcagggcactgatttggtttcttctaagtaattccccttcatcagtggttcatgttactgtttgcattactttcttgcccctatcaatctgtttagtttgcttctgttcatcttcctgtgttaattgcctatgttgctcattgacttcagtcagttctttttgttgctccttattctgattatcattttcagaattagtcttggctatccactccttcctcttagtcttcttcctcttttttgtcatctggtccagtggctttgtgcaatcacctgtattatgtcctaccttcaagaaatcctgacaaaacttaggagtccattcatattaaattatatgtggatactgtctcccatcaggtagttcaagtgcaattttctctggtaaaggctgtgagatatccatctcaattaaaattctggcatatgcaattcttttctcctgagctgtgagcttatctgtacaaataggtgtctctaggcagctagctatccttcccaggttttcaggggcccaaaactggattgggagattaggaaacatcacccacattggaacaatctgagttggttccttgctcatttgaaattccaaatcccattatttcagcacaaatggtctgtaatcaaacgtgtaaggtccttgctgtagaattgtttccttatcttcatcactatcaaatttgaagataaaataaccattgttgtgcaaatatacctgaggtctactcacataatttcacacaccatagacaaacctcagcctttccttgaaggtagggtttccatcaattacatacccaattatagctgagctccattttctgttttgctctgctatttcttgaggatttagtttcacgatattgatcccatccttcatcatcggcgaataatagttcaactggagtcctctgttctgttctctgttccctttgacaacctcagccattgttggcctaatttcacttgatgttgcagaaaacgttaatttcctcgctgcatgcatagctcctggttcctccagcggtgtttctgcatattccattgaagacctgcttgtaaaattgtaggggcactccccaatcctgggattcaatgaccaaattgaattggtgctaggacatggggaatgccagattctggtgttatttgtctaatttccggcaccagcttcttaggtgaggccggcggtggtgcttcttgcttcttcttccttgccattaccgtttggcacacgttagtaaccctaacttaacatgcaccgagagaacagtagcatgcaaagaaaattggtttttgatattcaacgtttaataatgtcatattaatattgatcaatcgggcaaacaaatattttatatgtaaatattactatcagatataatgggttcaacaattaagaaaatatatttttgtgattaatatttgaattgagtgcagttagtctaagtgtgaaagcataacataattttttgaaaatgcagtaaaatttagaaaatagaataataaaacttatttgaatttgagaaatttttaaatttttatctatattatattagatttagtgtggtagaaatagatattaaattcaaactagctaataaaaatctacatgacaatgtaataatattaggtattgtatagtataatataaaaataaaaaataaatagagaatttctttttagatttttatcttagaaaaaaatggtaaaacttatttaaatttgagatgagaaagattttttttattatgataagaaaagtcatgatatgaataggtccatgtaactcaagtctaatagaaaatcaaaaactaaaaatattgaataatagaaataaattagagataatgtgaggatatttataaatcataagtttagaaataaattaaattaaatatacaaacttaaattagaaatgaaagggaaaggctaattgaatttgaaattagaaagttgttaaaactatgattagaatgcttaaactatggatactatcatgaaattaaagtcttatttatgaaaaaaaataactaaaatacaaaataaatttctaaataggtaattatactaataaaaattaaaaattaaatttgtgttaaagctaaaaagaaagaaaatttacataagaaataagctgacggtgaaaatattacaacatttagatataatgtgttcaaacaactaagaaaatatttttctatgattaatatctgaattgagtgcaatagtataagtttgaaataataacatgattttttgaaactgcgttccaatttagaaaacagaatgataagaattatttgaatttgagatgagatttgttttattttggaaaatattatgtattactccatattactacatacatataataagttcaaataattaagaaattatttttgtaatattaaaataaaatttaagaatataaaataactttctaatataggtaattttattaacaaaagttaaaaattaaattaatatcttaaagctaaaaagaaaaagaaatttaactgcatctaaatcaaaaataattataagagaactcaatacatttggagcataatcatcaaataacttatgtattaattagcctacatcaattttataagttaaaataaaatatgatattattttggttataggtaaaaaaattaatgtaaaaactaattaaaatttatagtaggaaagaaaatgtataaaaatagagatagtatggggatacttatacattaaattaaatttaaataaataaattaaaattaaaatatatttgataatattactataaatttaattgattaaaatattccgaatgagaggatacaagcataaaaatataccaaaattcaagaataaaatatatctatttattaaaggctattaaaagaataataaacaagacattaattttattattaagctaataaaatattatatgatagtacaataatattaaataatacaataactataagcaaaaacaaaagaaaaaagaatttgtgtacaaataatgtgagaataggacatatttaacttttagattaaaacaaagtgatagtaagaagtttgttaaaataatatgatctattgtgctcaaacaaaaaagatcagaacgtgatatgtttagtattctttaatattgacagcgaaacgaaatacaagactaaaatcaaggtgttaggttgctacaaatataaaaaacaaatatgcactacgagatttgaacaataatttcatatcttacttcataattaatatctaatgttgtatagtttttatctgagaggtttatattttaaggttatttgcacatgatccaaatacatcacaatttaatatgttttgtgtccatgcatcgcgtggatactaatactaattgttgttttagtgactcaacaataatcgacgaagaagctgaactcaactattaaatattttctaactttcccatcaatcatgacgtacagcttaaaacggtccattatctttttctaaaaatttcgaagatggacatatatattagcttaagatttaaattaagcaaagatttaagacgtaaaactctatattaggagaattccagaaaattccaaaatgaaaaaagtggcttttgggcagttggtttagctgagaaaagtgggtgcacgattgaactcttaacaactaactcttaatagaggctctagtgtcacgtttttggctctcttcgttcggttgtttcaatttgaatttcaaatgttgaagtatagtttaaaacgaatactagaattatatttaatcaaaacgaactaatactatttcataataatattaattgatattaataaatattattcatgtaaagaaatgtgattacatggattttattcactagctaatacgaataggcaaaaataaaaatcatattactcaatcatttttaattacggatccatcactgatcaagtggtctatgtttccatagggtgctcaaaaaggcatgccgcattcaagcgggtgatgtcaaattctttgtcagagacaaaattagcttcagggcttttattctttagcggataaagctcaaccaaatatcttagtgtatgacaaatatttgtccaatgtccttttccatcgcaatgttagcattcagtttctgaacattttgcctttggcttctcatctttccctttccacttttggtggttatttttctttaggggatgattaacacaagaaaatttcttccttggccacgaccacgaccacgaacagggccacgaccttttccacgcttagcataatgggaatacatcacatccacttcgggcaaatagtgtaaacctagtgggtcgattatcgtaatttctcatgagcaactcattgttgcgctcagccacaaggagaagagaaatcaactcagattacttcgtgaaatctttctctcgatactattgttgcaggaccacataagagacatgaaatgttatgaacgttttttcaagcatttcatggttagtgatattatctcctaaaagcttcaatttataattaattctgaacatcggcgaattgtattcagaaacaaacttaaagtctgtgagcctcatatgagcccaaccatattgtggttgtgaaagtgtgaccaattttaggttgtcatataacctttaagccatttcacaaaacaagtcgacttttgactaagagatattctgttttcaacccatcatcaaggtgatggcgcaagaaaatcaataccttcgcataatcttgggtagatgttttatttttatctttattggtgtctccgagacccattgcatctaaatggattttagcatccaatacccatgacatatagttcttgcccgaaatttcaagtgcaatgaactttcgtttcataatatcatagttaaaagaggagaaaaattataccgtagtcttctcaaagagcttcttgagacggtaaagtctcgtgctgataatatgttatggaataatataaaataaagtaaaataagaggaatttagagagataatactagatcttttcttgatgattttttcaaatgagtagagaagtcttctatttataagaaagttgtttggtggccaagtaactagttttggtggccaaataacaaactttgtcaagtaaccaatcttactgatcaagtaactagactagtttatgactaactaacttgctcccaaggaatttcataataatagatattcactcttaatataatttataacaagccacaattttatcgagcgaggcaacatatttttaatcacggtttttattattatcatttgtgaactcaaaaatatattcgaaatttgaaatttgtcaaaaggggaaccgtggctatatatgaggtgttagaaataattatccaattttgccacaccataaaccgtgctaataatttatttattttaatttattatattccagtcagcctcactttaaccgtggctaaattgtacctccttcggtccacatattgatttttgaaattttttttttggtccacaatattttattttttttaaatatcaagaagcaattaatttttttttaaattgctctttaaagagtattggagtatctatgatgtttcgaatgaacaaattaaagagataataaaggttaacacggtaaattcattgttaactaatattaaacggtgaacttcttaataggtgtgaaaaagtcaaaaaaaattaattaaagtggacaagagggagtacatattttcttagaaacaattaccagtattttactgatatccatacataattaagagacatctactactccttcgtcagttattatatttctcttttatacgccccttaagaaactatttgtaagaagagttatttgattattatacccttatttatttttcgcatttaaattttattaactatctaattattattttatttggcaagaacaattaatactaaggataagatgaaaaaaattaattatatcttgatttcctaaaaggacaagtgctactaatactgatcgaagtctcataactataatcaatcataattgctagcacactggaaatgcaaaatgttaagaggaacataatcgcagttcaagaatatactatacacacaacacaaaagagaatcttagatgagttgatcactcagtaccaaatttagcctgtaaaattttatgaagagtaaccaattgaatttttgttgctgttcctttatctcaaattagcacacccttctttgttcctttattcaacgtcttagatgctaagaatagccgattgatttcgttcatattcaactgtcatcctcccatttttctgctctctaagccattttggtgctaaatcaaataatgctctctcctgcacgatagatcttaagcagtgcaggaatcactgtatcagacaaaacaggctgtgaatagcattaactcttaaaatcagatttttcaaaaacatttgggaactcaaggccaaatgctagcttaaaacaaacaactttcaagagaaactggaaccggctatggaaagctgataatgattaacaaagtcaaaagacatcataactaaactctcgtagagtacaaaataaaatataaaaggtactgcatacaaaatcacatattcccaaaattggaattacagcaaaagagaatatgaaactagtctgaattttctggttgcaacagttaagcagcaccaccagctccagccttgcctttcttcttctgtagtttcttcatgtagaactcaagctcttttccctccaaaatgtacctttggaatttacagttaaaacacatatcagcaaatcaaaaacactgaaactattttcatgacaagggaaggtatgtactgagcttaagacttacccgtctgctctgccacattgaccagggcgggaagagatacaggccaacagcctaccaccaccaaattgctcttcaatatgaggatcaagtttacgatccttctggcgtgtctcaatcttcctgagaacatggttgctcttcttagtttcctctgcagcggcagcagcaccttctccttcctcagtagtttccttcttagtaggcccctttttcttcctaccaatgtcaacaccataatgctggaggtaccattgtttaaacggcgcagcatcaacttgaacaatagcactcttgaccagagtttgtgtgcgaacaagttcattgtttgaggcattgtaaaccacatcaaggatacgagtcttgcgtgtgactgcctcactaccccatgagtaatttccagtatccaatcttagtgccctccacttcacattgccaccacgcacacgaattcgtcggactgtcttgtttggcgagatcttagtattagcaggctggcggccaagttcataccttcaataaattgaaatcatcagaattcagagtcaggaatgcagccaacaaacagtgatttacattatagtttctcttatcatattgtaatgattaaagatcagtctaacaaattgttctgcaggcaaaggggaagatgactttactaactatcatttagggctaaggaccatatgctcatattttgccatgttttactcaattgcattatacagtaaactatatggctagaactgatttacttacattccactagatcaaatcaattgaaacatcctggaataaatctttatttatagtagtaagatttgtagtctcactggacctacttatagttgatcaaataacaacaaaacaaaaacacagtgtaaccccataagtggggttcgaagagggtagagtgtacgcagaccttacccctgcctttaaaaagactgagagattgtttccggtagaccctcggctcagggaggaaaaagggaaggggcaataacaagcacgtcgatcaaataataaagattcacaaaatgttaaatcattctgttacaaatatctaaggtgattaaatcatttcctcttttaaataagatggtggtttagcttttcttttccagatgcataaatatctcacttataataaaatcagtgaatctttttgaaaactgatcttttaccagaacagagacacagagatcagatttatcatgcaacagatccttcatgaatagtagaacacaggattcccacattggaaaaccataaagaaatcactttcccttttttcaaggcccctaacctattcctggttcggttctccagtgaaaagatttgagataccttctaccctactaagctttgtagaaagcataattgtggatcacgacaaggttacaaacaattttgaaaagaacagcttcagctataattactctgaatcatatttcagaattccttctcgttataggctacttgtctccaaagaaatatacttgtcagtttgaaggtggacatttgaaagggataccctaattctaggcctcgtacaatgacattcactgggctgcttatacttctatcaattcattctcaagccaaatcatgccatgaacatacacttactagctaaaacatattctacctataaactaaaactaaaaaaaagatggatcaatcgaggtatgcacaagctggtccagccaccagtcataagaaacaaatctaattttccaatcacagcaaatactaaaagctaaatcagaagttcctttaaccataacgctaaatgaacaatttttttgagcccaataagctacaagttttataacagaatcgagcatcgtcatcccttttcagtggtaaaagggatatgctgagtgcaataagaagatacacagacacatatcaccagatacagtagaaatgattacagctaagacaaaagcttgattctaatgaaagacgaaagcttactttcgcttcttcctccaagctttcttcttgccaccagtggcacgcctcttgtgcatagaatctcgtgagataccttatatcagtaacaaaaatattattgacattaggataaattcttttccatataattacacaaagagaacataaaatgaatccgcatacaaggactgttaaaggtaaaccaaaagagaagaaagaagaagagagaggaaatggataacatacccatgtttgctgagagcttagccgcgaagaggcagactacaccacttctctttcactttgtaggtaacaaacaacaagacctcaaaaaccctacttttagaacgcctgctgctcccaattctgggccttattcatgtttgggcttggcttttcatttctcatttgtgggcttatactaatagcccgtttgaccaaagcttttgaaaagaatatctcccaaaaatacttttgatgacaagcagctagtttttcactaatcaatttagagaatacttttaatcaataattaatatttgataaaacttttaaaaaatgcttctaatgtatttttttgaaagtacttttcaaaaaaaaatacttttgggaagaagctgaatttttttttgattctcaataatagattttacttttacacaaaagtacttttcattctaaaagcttgaccaaatatcttaactttagaaaaaaatacgtttagcttaagaaatacttttggctataaaaaaattgcccaagcaggctataaaaccctactatcaaatctatgtgcctctttatttgtataatttttgtatctagcatacataatgtaaatatatacaaaaatataccaattttatacattttattcgatacagtgtcatttttcctataagaattctttgatgggcttggttgtttgggaataaatctatcttgacccgtgacaaatgctagatgaaattcaacccattaggtgcccaaactcaacctgtcagattaccaatttcagccctatcctagattaaactaagttcctttgtaaagctcaacatatctgttagctctgaaggttctgtgaagcggtgaaagtgacctaatttcttcaataaatttgcgccaatgagcttttcaaaagtccagcgaactcccttcccattgattaatctccagcttcgagatttcattttaagctgtaaagtttttctattttctcattctcttgatcttcacgtttggtgatttatattttgcttttgagtgactgatcatgttcaactctgtctaagaaaagattaagcgagcgttgcaaatataatccggggtattatgctgcagagtcgaatcccacagggacttaacgtatcaacaaaagcttgtaaagtactaaattcgtattagtcaacctcctcaaactttatgaataacaaatggtggatttggttgtctctatcaatcatgaactctctagttatcgtaaatctttctcaagcatttaggataatttactagacgcactctctcgagctacgctagctatatttatgttacggttcactttagattgcacccgaggtatattatctctaacccaacctccaaaccctcagttatgactctcgtctatactccggtagtggtgttgttcaacaactacctaaatatgcactatttctcaagcagatacataataaataggaacagctagttgaggggccttcaacaaactacaatcaaaacgtagttgaacaaatagaaattaataaccaactcaaaactatattaacatgccaacaagttcatctccaacgagttccaccaaaaccttagattaaagtatttagctactcataataataacaaaaactacaaaaaaattcatagttaatggtaaaataagaaaagaaggattgatgcccaaattgcctccttgcctcttgcccttgttttgttgttttctaaactctaaaaactgattctctcctctcttgggcgtattccttaagtttatatagggtttggggcttaagatcccgtgttttgcactttagtccctgaagtttatgcgtcctgccgcggtcgcaccgcggttacgctaggaccgcggccaaacaggttctctgaatctgaggctgccttccgccgctgttgcaccgcggtcctggagtaaccgcggtgcgaccctgttacgtttggaatttggaaaaacgtaaaacatgaaaattgtagcccttggagttagttttccatccatatattatataacccaaatggagttcggagcaaaaagttatgtccattttactagacagtgcgcaatatgcctcctcgagtcttcgtttgttctcaactatcaaatttgatccccgaacacgatcccgacttaattccttgagcttttactcaaacttcaaatctccaaatcacttaaattcattccataacatctatatagctcggaatcactcctacaaggcataaaacacatagttagtgcaaaacactggcgattaaagctcaaactcaattaaagtgcagtaaactagagtgtaataagcgactaaaatatgtaattatagcctatcatcaacaccccacgcttaaaccattgctcgtcctcgagcaatcaaactacactttatatagacatgacttttttaagcaattctcctaactcatcaccccaagaatatttaacatagactaagcacaaaagcgtaacatcttcacctcaagatttgactcacaagtaccacgcattattcacagctcacccacttactctaacatagaggtcactgacattacctttacttcatgaatcaagtgccctcacacaacaaaatagagtagttccacacaataaaatttaagaacacgtaggaacttaagatagaaagaattcactcactctcataaataacatttatgtgccacaaaagatgcaccataggcttgcccgtagtgtactactctactaatcgagttcattcagtctaagatcaagtaggactttatttggttgtaatgtaggctgcgggacgagtaggatatatttagatataagagtgactacacctccctaagcactttaatacatatacattaacattcaaactccatacttatgtcaaaccaaactccgccttcacatcaatatatgttaccccatacttttttaagcacaattacatcaagagtcaccacttatcaaggctatagatctttttttttcaagtgactcttactttttcaaaacagtgcacctttctccttatttcattagttccactcaaaagctaaaccaaccaccccacactttaacttttacacagtttataataattcaagtgcttatgagaggttaaaaggttcaaatagatagtccattcaaacaattgggtaaggcttgtaatgtggttgccaaagaaataggattacaggctcaaaggggttaactacgatacgtaataattaggcgggtaaaatatacatactggctcaacaaagaaacgcttatatcacttccaagactgaacaaaactactatttcgctttgcaaacacacggggcaagttctagacatcaaatgcaatgcacagaataacacacaaacctcacacacacatggcacataacactcaggattggattcatcaagacactctagtcaaagcagttaagcaaatttaaaattatacaatttaaggtacttatacaagagtcaaaaactgagcctaagcgtcacaaccaaagtactcactattctcaaggcataacaaagtcaagacttcaattcaaaacacaacacaatggctcctctttctaaaaaaacctaactacacccggttcaaacaaaatccttggaaaagaaccgcgatcaaaagaaaaaccaagggggagttgctacactacctaaaaagaaaataatttttttttcctttagacttaaatccctcaagaaaattgtctaatagatccatcgtcgggaaaagtccaatcttttctatttgtgtaaaaaataattattccattaaattgacacaactaaaataacatagaaagtcacacagaccatctcctcaccccacacttaaaattgtgcattgtccccaatgcacacccatacatacaagagggtaaaaaaaactccctggtaggccaaaggccgaagcactagcatctcatggggtactcagacttctctcaggcctggtccttcgtgcgggtacctcacacttagttccaaccaatggtttgttgttgcatccttccaatagttttgcttttcatgctcctaaaaaaattaaaaatcgacactacaaaaataatataatacaaaaataataaaaaataaaaataaaagaaagcaataaagatgggttgcctcccaaaaagcgcttgatttaacgtcgcggcacgacgtgaatcactttttgcctccacctcgagcttatgaattgaaccccaagttttgattcaagcttatgattatggtcatggggcggtggaacgaatctaactggcccaaggaaataatgtagtgttctgcattccttggcctttgtatgagatatgtaatcctgactttctggcaagaagaattccagaatatatgcaccttgttcctcattccttgactcctcaatcggctcggatgactctattttcatatcatcatccatgttttggagtgaggaccaatgcgctcaaacacatgaattgcaggactttcagcatcctcaacaccaatcacactagagtcgactaaatttgtatcctcaacgtccctggttgactctagtattacttcttcaacatcggcatcctcaaattctagctggttagagtgttggggttctactttggacccctccattggcacctcaatttccatctctaatgcacactgctcctggctactatccataatattggcatattgagcattaaaagcttcaactagttgactcgcttgagcctccaagttgcgaatagttgcatcttgcctttgtacccgctgtagtaactcatcattttgttccacaaggaacttcatcgtatcctcgatctttctcaggtcatcatccatgggttttttgtttctattaacttcacaagaaaaagaagaaccatcaaagtaaggggttggggaaaaataagaaatataagcacaaccatgaaagtgaccatcttgaccaccacacatatcacacacatttcacacataagattgagttggtgcacataactcgctctcggaaatattttgataattttgccctgggtggtttcctccacaatatgcataacgaggatcaaaagtagaattaccaacatccaaactcttataattccatgatgccatgtttttacaaattaacaaataaaactaaaataaagaagaaaaaattaaatactggaaaaaaaattcaaacttgaaacctagcaatatgtacacctacaactacacgtcaaaatttcaatgtatagattaaaagtgaagaaaattgacacactaagaatttttgtatatcttccaactacaattgataataccgttaagtccccgaaacggcgccaaaatttgatcacgctcaactatgtctaagaaaagactaagcgggcgttgcaaatataatccggggtattatgcccagagtcgaatcccacagggacttaacgtatcaaaagaagcttgtaaagtactaaattcttattagtcaacctccccaaactttatgaataacaaatggtgttgttattactactacagctaactgaatttataaaactaagagtaactaacaagcagttgtaaacaattgaaataaaagtctaaggtaatggtttcccccgttggttctttccctagttgtatgttcctataactttgatttggttgtctctatcaatcatgaactctccagttatcgtaaatctttctcaatcatttaggacaatttactagacgcactctctcgagctacgctagctatatttacgttacggttcactttagattgcacccgaggtatattatctctaacccaacctctaaaccctcagttatgactctcgtctatactccgggagtggtgttgttcaacaactacctaaatatgcactatttctcaagcagatacataataaataagaacaactagttgaggggccttcaacaaactacaatcaaaacgtagttgaacaaatagagattaataaccaactcaaaactatattaacatgccaacaagttcatctccaacgggttccaccaaaaccttagattaaagtatttagctactcataataataataaaaactacaaaaaaattcatagttaatggtaaaagaacaaaagaagaaaagaaggattgatgcccaaattgcctccttgcctcttgcccttgttttgttgttatctaaactctaaaaactgattctctcctctcttgggtgtattccttaagtttatatagggtttggggcttaaaatcccgtattttgcactttagtccctgaagtttacgcgtcctgccgcggtcgcaccgcggttacgccaggaccgtggccaaacaggttctctgaatctgaagttgccttccgccgctgttgcaccgcggtcctggcgtaaccgcggtgcgaccctgttccgtttggaatttggaaaattgtaaaacatgaaaattgtagccctttgagttagctttccaaccatttattatatagcccaaatggagttcggagcaaaaagttatgtccattttactagacaatgcgcaatatgcctcctcgagtcttcgtttgttctcaactatcaaatttgatccccgaacacgatcccgacttaattacttgagcttttactcagatttcaaagctccaaatcacttaaattcattccataacatctatatagttcggaatcactcctataaggcataaaatacatagttagtgcaaaacactgccgattaaagctcaaacgcaattaaagtgcagtaaactaaaatgtaataagcgactaaaatacgtaattatagcctatcatcggtgaccaattataataggaagtaaatgattcaatttaaggataatgtgcattgggaaaacatttcgccgtcagcattcaataattggtgaagattgaacatttctatatatgtaagagaaattaccgcaaaactttcgagttaaagcacaagcattatttgttaaaataatgtattttctcgcacgtaactcaatatgttcgagtaagtaaaagaattgaggatgttataaataaaattttatttacggtgagtgtctatattttagagagattttagggattttatttagtgggtaagtcattctttccctataaatagagaggtcatattcaattgtaattcatcccaaaattaaataagagtttcttctctctttctctgcaatattgttctttcttcttttattgtttcgtaacacgttatgttgaaatccatttagatgcaatgggtcttggagacgccattaaagataaaaataaaacatctacccaagattgtgctaagtccttgattttcttgcgtcatcaccttgatgaagggttaaaaataaaatatctcacagtcaaagatccacttgttttgtagaatggcttaaaaagaaagatatgacaacttaaagttggtcactccaagactttaagtctgtttctaagtataattctgcaatgttcagaattacttctaaattaaaactctgtggagatactatcactgattatgatatgcttgaaaaaatatttacaacgtttcatgcttccaatatggtctcgcaatagcaataccgagagaaaggtttcaagaagtactctgagttgatttctcttctcattgtagctgagcgaaataatgagttgctcatgagaaattaagacaatcgacccactgggtctacaccattgtctgaagtgaatgaggtgtattcccattatgccaaacgtgagaaagaccgtggccttattaaatattaatgatcatggtcgtggccatggaaagggaaatatgagaagccaaaggcaaatggttcagaaactgaatgttatcgttgcggtggaaaaggtcattgggcaaaaaaattgtcgtgtacctagacatttggttgagctttatccagcatctccaaagaataaaggccctgaagctaatttgtctatgataatgaatttgacatcacccgcttagatgtgacagacttctttgagtgtcctgatagaaaaatataccacttgatcggtgatgaatatgtggttaaagattgagtagtttaattttattttattttacttattcgtattagttagtgaacaaatatcatgtaattatcgtagtttacctaaatagtagttttaattaatatatcgaattagtataatatgtcattgaataaagtttgagaatggtcaaaattcatgtctgtatcagttgtttaaaactttgcaaacgaaataaaataaaatatttacaacaaaaacgttgcaaacgaaataaaataaaatatttacacaaaaacgttgcaaaacttccctttgctactctttccataaacttccaaagaagaagaaataaattgaagaaaatgggttggtttccttgcactggaccatccaaacagacctcaaagaagaaaaattgcttcgattgagttcaacattcttctggtattttatcaaatctgcatatttgattatttgtgcatttaatctactgattgtttgatttggtgaaatggggttgttttatatttgttaaatttcgtgggttttgattattttggattttaacttccgattcttggaaattgagctgtatactgtttttcgtaatttgatgtcctggatcttgatacctgcaatcgtaatacaatggctaattattgtacttgactgttgttgtaatatatatatatatatatatatatatatatatatatatatatatatatatatatatatatatatatatatatatatatatatatatatatatatatatatatattttttagctcgacgcatatacttataattatattatttttagctatgtaattatttgtatcataatcagattttgctcgaaattgtattaaaagtcattattgaatcattggtttaactttatttctttttcttttatttgaaatactaatatttattcatattttttttatgtatgtcaacccatggaaagcaactatggattattccacaaagcaaacttggaccaaagttcaattataaaaatatttgtttagttgattcatgtacgacaccatacaatattcaaagagaagaaatatttctcttatttaagtatgtgtaaggcagatgttactacaattgctggtagtagtaaattaattaaagggtttggaagagctactataactctggctaagagaacaatacttatcatagagaatgcaatgttctcctccaagtccaagaggaacttgttgagttttaaggatatccgccgaaatagatatcatattgagacaatagatgagaataatcttgaatatctcatcattaccaagaatgtctctggccaaaaaagggttattgagaagttcccatctttatcttgtggcatgtattggacaagaattagtgcaattgaggcacattttattataaaccaaaaggttacttattccaatacttttgtattttggcatgatcgattgggacatcctggatcaattatgatgagacgaattataggaaactcaaatgggcatctattaaagaatttaaagattcttttaaataatgaattttcttgcacttcttgttatcaaggcaagttaattataagaccatcaccaacaaaggttgggattgagtcccctgcatttttggaacgtatacaaggggacatttctggacctattcacccacctagtgggtcgtttagatattttatggttttaatagatgcatcctctagatggtttcatgtgtgcctattgtcatctcgcaacctcgcgtttgcaaaactaatggcacaaataattcaattacgggcgcaattccccgataatccaattaagtctattagacttgataatgctactgagttttcatcccaagcatttaatgattatttcttatcaattgggatgaaagtggaacatcctgtagctcatgttcacactcaaaatggcttagcagagtctttaattaaacgtctgcaattgatagcaagatcgttactcatgaaaacgaggttgcccacttctgtttggggtcacaccattttgcatgcatcaatgctagttcgtctcagaccgacaaattatcataaatattctccgttgcaattagttttggatcatgaacctaatatatcccaatttaagaatttttggatgcgcagtatatgtgcctgtagcactgccatatcaaaccaaaatggcaaagaatgttaggaatatatgtttggtttgaatcgccctccattattcgctatgttgaaacattaacgggggatttattcactgctcgatttgcagactgtcgcgatgagacaattttcccaaaataaaggggagaaattggtgaaaccaaaaggaaaattttgtgaaaaatccatcattatctcatcttgatccacgtacctctaattgtgaaaaagatgtgtaaaagattatccatttgcaaagaatagcaaattaaatcccagacgcatttacggatttgaaaaggataacaaaatcacatatccctgcagagaatgttccaatccgtattgatgtccctattagacaatcttctagtgtcacaactaatgagtcaaaagcatgcctaaaacgtggcagaccattgggttctaaggatcgaaatcctagaaaaaagaaaaaagaaatgatcaaaatgacactacgaaagagtctcatgaagaaatccacgatttaataaattctgagattcatgaggaaaccattgagcccgagactcaagaaaataaggaactagcaataaatccaatcgatattgagacaaatttgaatcgagtggatatagtggcagatcatgtctctgcatataatgttacatctagaattatgcaagatagtaatgatcttgaacctcgatctgttggagaatgtcgacaaagacgtgattgactaaaatggcaagaagcaatccaatcagagttgaattcacttgcgaaacgtgaagcttttgggtctgtagtccatacacctaatggtgttaagcctgttggctataaatgagtctttgtacgcaataggaatgagaaaaatgaggtacaaagatataaggcacgccttattgcacaaggattttcacaaaggtctgatgtcgattatgaagagacatattcacccgttatggatgctacgttccgttatctcattaattttgttgtccatgaaaagcttgacatacatttaatggacgtggttaccgcctacctttatggctcacttgataatgaaatatacatgaaaattcccgagggatttaaaatgcctaacacacataattcaaaatcccgaaaaatgttttcaatcaaattgcaaagatctttgtatggtctaaagcaatcaggacgtatgtggtataatcgtcttagtgagtatttattaaaggaaggttatataaatgatgccatttgtccatgtgtttttataaagaaatcaacatcggaatttgttgtacttgccgtatatgttgatggcataaactttattggaactcctatagaactacaaaaggcaattgagaaagaatttgagatgaaagatctctgaaagacaaaactatgtcttggtttggaaattgaacatttggcaaacggaatttttgtcatcaatctacctacatagaaaaggtattgaaacgattttatgtggatggagcacatccattaagtacactgatggttgttcgatcacttaatgtgaataaggatccattccgacctcaagaagagaatgaagagctacttggtcatgaagtaccatatcttagtgcaattggtgcactaatgtatcttgctaacactacaaggcctgacataactttttcagttaatgtcttagcaagatatagctctgctcctacaaggagagattggaatggcatcaaacacatattgcggtatctaaaaggaactaccgatatgggcttattttatgacaataattgcagtcccgatcttgttggctatgccgatgctgggtatttatatgacccacacaagctcgatctcaaacatgctatgtgtttacatgtggaggtactgccatatcttggagatcgactaagcaatcaatcatggctacttcatctaatcatgctgagataattgatattcatgaagcaagtcgagaatgtgtgtggttgaggtctataatacatcttattcgagacaaatgtggtttgaagtgtgacgaactatccgcgatcttatatgaagataatgcaacatgcatagcccaattgaagggaggattcataaaaggagataggacaaaacatatttcacctaagttattcttcacacatgatcttcaaaagaacagtgatattagtgtgcaacagattcgttcaagattgggatgcgaaggctcaaggatgtgaattgatgctctcatcagagagagttaatgcgccaaaaggcgtatttttaaaaatgtgtagtctttttccttttctagaatttttttcccattgggctttattttagttaagattttaacgaggcacattatctgttgaatagacattcaagggggagtgttataaatagaattctatttatggtgaatgtctatattctagagagattctaaggattttacttggtggctaagtcattctttccctataaatagagaggtcatattccattgtaattcatcccaaaattcaataagaatttcttctccctttctctgcaatattgttcttcttcttttattgtttcataacagagtacttgtttgtagaaatttataactttttgtagtatgtatagcatttatgaagacttgtttgaaaatatttggctgagaatgtttattgatatctcaaaaaaaaaattaagataagttgggtcatggctttgtgtataaaaatgggaaaaggcccaaaagatctcttgaactatccgtaatagacaactttatcatccattttgctttttacccaaaaatattcttatcattagttaagtagctcaaaaatactctttatactaacgattgcattagaacaagggaaaattgtcaattttgccatgaactattcgaaatgagacaactttatcctccatttaaaatttggaacaagttcccgtttgtaaaaatttgagaaaaatatatattttttctttctaagctttctttctagagcagtgaagtttttgataataaaaaagcaaagacattaaatagcagcgttataacctaaaggatcctaaggaaaattaaaactttgtacttttgtaaacaaaaataatattcggggagaatcaatgcactctcgagatttaagttgtgaaagttgtacttcttagtcctagatatttctgtaaaaccaattatttgtcttgtataatttttttttaattgccatcatttgtataaggccaagtagaagcgggcgttcatgcagttcggattaaatataatttggatttaaatttttaatctttgaattaaagaaatgactgtaggcgtataaattttattaaaattaattccataaaggaatttggattatattttaaattcaagatatattagtccaaataaatactactgactaatataattgaattaattatataagtccaatatatatggattaaataaataattcttaatccattgggctagcccatttagttgggctaaattgatgagcccacttcattaggcccaatataccatcttcctagaggcccagtgccacatgtcaaatgacgtggcatgccaagtcaaataaaagagccaataggaccatgccatgtgtcaaaatgacacagcaggacaagtcacattaaaaggccaatgaaatcgcgccacgtgtgcaagtgacatgttctggccaatcaaatgcggccttgtcacacttcaatttgattggtcgaaaagagtttgttcttatcataactctccctcccacaactataaatagggatcttcataactcagaaaagggaccagaagttataacaagaagcaagagagagctcgtggatcaaacgctgcaaatttctctacaagtttcaagcttcatacaatcaagttcaagttcaataaatcaagttcaagctcaagaacgaagaacaattcaagtattcaagatcaagaacgaagtcaaatcaaatacaaggcgttcaaaatcaaggctacttgttcgtgatacaattcgtggcaacaatcaaagtgttcgcgacgataaatcaaattcaaattcgagatcaagctcaaaggcccttgaatttatactagaaaagtagaatcagaggattcatagagattgtaacgctcaaatatttgaaatcgaatactacgattgtcgcaatatttttcggtcttgattttattttcttgacgcaatttattgtctacaaattctggcacgcccagtgggacaatctctacctctcatctcagcttttcagtctttaattccaatcaccaaagttcaagaacaacgaaatggcttccaagaaaaccaactccagctcatcttccgccaaagctgctaattccaggttctatgctgatgtggaagacatactcgaagttacctttggaagctttgggccagttacgaggagcaaggcaagctcgttaggacaacaagcacctcaagtgccttctgcatctacccctgttttgggatcttcgtcctcaaaaggagcaagatcttccacgaacgcacccgaaggaggaagcaatgtcgctgaaaagatcaagaagactcttgctctacttgacctctccggatccaagcattcttctgtgaaggaagacgatgacacttcaagtgatggatcctccccacttaccctacagagcgtgagccaatcaaggatcaatctgtgtgaaaatccgtgctactctccatcgtccacaacaatcatgcaagccatggtgacaaacacttcatctgtggaggagcagttggcaaacctgacggaagcaattgccagcttgaccaaatacatgcaaactcaagatgctagaattgacaagctaacagatagggtgggaatcttgatggaagaagaatctacccatgcacctggcaagctcccagaagttcaagagattgatcctcccccaagacaagtcgcatccaataaggctacccctatctcgtctgaagggatgattccaatcgatcaactgaaggagttcatcgaaggaactatcaaaagcaagtatgaagttgctacaaagtcttcccttacatacgcaaagccgtacacggcaaggattgatatgttgaagatgcctgctggctatcaacctccaaaatttcaacagtttgatggcaaaggcaatccaaagcaacatgtggcgcactttgttgagacatgcaacaatgctggaacttatggagattacctcgtcaagcagtttgtccgctcattaaaaggaaatgcttttgattggtacacggacctcgaggctggatctgttgatagttgggatcaattagaacaagaattcctcaatcgcttttatagcacgagacgtactgtgagtatgatagaactcacaaatactcgtcaacggaagagtgaaccagttgtcgactttatcaatcgttggaggaatgcaagcctcaactgtaaagacaggcttagtgaagcctctggcatagagatgtgcattcaaggtatgcattgggtattgcgttacatcttgcaaggtatcaagcctagcacattcgaagaacttgcaactcgtgcccatgacatggagttgagcatggcctccgccggaaatgaaaggttgcccatctatgaacctcgcaaagggaatgacaagcaagaagtcagaaaatggagcaagtttgtaccaagatccgaaaataaagaagctatgaatgtcaacacatcacctgcgaggttcgcgacgaaagtgagcaagaagtcgagtacgagatccgctccgtttcaagaccatccaaatggaaagttgactctaagagaaatgcaagagaaagagtacccatttctggattctgatgtgccggctatctttgaagaactcctcgagttaaatctcattgagcttccggagatgaaacggccaaatgaagctgggagaacaaatgacccaaattactgcaagtaccatcgactcgtgagccatcctctagagaagtgctttgtcttcaaggacaaagtcatggacttggctcgcgaaaagaagatcgtgcttgaagatgagaaggcaagcacgaaccaagtttctatcacctttggctcattcagtccggatgaattatgcggttttaaagaaagaaaagatgaaaaattactggaaaatcacaaagttgaagacaatcaacctgaagacgatggaggttgggcattggttactcgtcgtaggcaccacaaaaagagcccacaaaaagaatcagtagaacaaccaacaagaaaaatggtagtaagaagactagggagatggaacccagttaagcacttgaagaaagcgaaagtggaggtacaccaccctcaaaagccacgacgtccagtaaccttggaggagtttgtaccaagttggttccgcacgaagatttcccatgggggtattgatgcctcttgtttccacaccgacgaagggaaagaagagagtgatgatctaccattggcatcatcttcggaaaagcttatcgagtccactcctcaagaagtcaatgcttgtgaggaaaaagtcacattcacaaatgacgatctgctgctaggtgacacttctcataaccgcccattgtacctggttggctatatgcgtgatgaaagggtaaaccgaattttcgttgatggaggatcctcagtgaacattttgccaattcacactgtgaaacaacttggtattcccatgaacgaactctcagaaagtcgtgtaatgatccaaggattcaaccaaggggggcaaagagccataggcgcaatcaggctgggaatcacgattgaagatatgcaatcaagtgcatggatgcatatgatcgatgcgaagacttcatacaatgtcttgcttggaaggccttggatacatgagaataaggcagttccgtctacctaccatcaatgtttaaaatactacgagggtagagtcgagaagacgatagttgccgatgatgcgccattcaccgagggagagtcacacttcgctgatgcaaagttctacttgaagaaccacattgtgaaggagctaaaagttgatgatggcataaaaagcaagaatggcgagcccatagttaaaagagctgaggtaactattggtaaagccagatctgttactgaggaggtaccacccaacgtgaatgaatctcatagaggggatattgcatctcatggcaagaaagtaagtcctaagctccaatatgtccctaaaaggaagaaagacgagggcgaatcatcaaatctccagaccaacacactaaatgagttaactcttccggtaaaacgaattgaggtagtaaagttgtcctcaaacctgcttgcagggtttgtagctcaaaatcgtttgcagaatgtggcactccctacaaagcgaacagatgaaggttttgatcctaacgcttacaagttatttacgaaagctggatacaatccccatgagccttcaaagttagggaagctcccatcagaagctgaaacgaggcaaccacgtgaaggtttgggatacaagcaaccgtcaccagtgcgcatctccatcaaaagggcgagtagcaatcacatcacggtaaaagatgaatctgccgcttctaacaggccttctgtttttgacagacttggaaaatcaactgtgagaacttccgtatttgagagattgggcccattaaaaaaggggaataaattccagagaaattatcagaatacaagaacacccgctttgcctaaaattcagaggatccctaaagattcccaaagtttggttccttctagaatgaggcgacaaacagaagtcatggtttcttgtgatgaagtactgaaggtgaagccatacactgtcgtctacacgaaagaacgtgatgacgacgaagaaagtgtaggttcttcgtatcatgtcactatagaaggtgagaataatgttccatcttccatgaaggataatgcagaattggagggtgtttcaccatgttatcacatatccgtcaacgatggggaccctcaagaagatgaagatgcgaaagatgctcccccagaacttgaagaaggggtgaaggtaactgttgatgctttaaaagaagttaaccttggcactgatgaagaaccaagacccacctacctaagtgctttactaggagttgatgaagaaagcacttatattgagttactcaaggagtttagggatgtatttgcttggagttacaaagagatgcctggcttggaccctaaagtggcagtccatcaccttgcggtcaagaatggtgctcgtcctgttaaggaagctcaaagacgctttaggccggacttggttcccttgattgaaaccgaagttaacaaactcattgaagctgggtttattcgggaagttaaatacccaacatgggtttcgagtattgtcccggtaaggaagaagaatggacagattcgagtatgcgttgacttcagggatctcaacaatgcatgtcccaaagatgaattcccgcttcctattccagagttgatgatcgatgctactactggttacgaggcaatgtctttcatggacggttcgtcaggctataaccaaatccgcatggcaccaaaagatgaagagctcactgcatttcgcacccccaaaggtatttattgctacaaggtgatgccttttggcttgaagaatgctggcgctacttaccaaagggctatgcagaatattttcgaccatcttctccacaagaatgtcaaatgctatgttgacgacttggtggtaaaatcaagaaagaagggcgaccacttgaaagacttgagaatggtatttgagttgctccggaggtaccaacttaggatgaacccattgaaatgtgcctttggagttacttctggaaagttccttggcttcattgtccgacatcgagggatcgaaattgatcaagccaaagtagacgctattttgaaaatgcctgagcctagggatattcatgaattgaaaagtgtgcaaggaaagctagcataccttagaagatttatctcgaacctagctggaaggtgccaaccatttagtcgcctcatgaagaaaggtgttcctttcaagtgggaccaagcttgtagcaacgccttcaaaagtatcaaagcctacttgatgaagcctccggttttagcagctcctatacctggaaagccattgatactatacattgcggcgcaagaaaggtctgttggagcactgttggcccaagaaaatagtgaggggaaagaaaactccctttactatttgagcaggatgatgacaccaaatgagctgaattattcgccaattgaaaagctgtgtttggcgctagtcttctcaattcaaaagttgaagcactactttcaagctcatgttgtccgtcttgtttccaaagcaaatcccatcaagtttgtgatgtcaaaacctgttcttagtgatcgactagcgagatggtatctccaatttcaacaattcgagattttgtacatccctcaaaaggttgtaaaaggacaagcattggcagacttcttggcagatcatccgatacctgatgactgggagctaactgatgaactacctgatgaggacgcaatggttgttgaagttcaacctccatggaagatgtactttgatggttctgcgcatcgtggaggagccggtgctggcgtagtatttgtcacttcccaaggcgaagtattgccctactccttcaccttgacacaactctgttccaacaatattgctgagtatcaagcattaatacttgggcttgaaatggccgttgatatgaagcaattgcagttgcaagtctttggtgactcccagttagtggtcaatcaacttgtgggtagttacgaggttaagaagcctgaactacgcccatatcatgattacgctaaaaagttaatggggtggctcgatgatgtgactattcagcaagtgccaaggaaagaaaataagaaggcggatgctttagctgccttagcttcatcgttaaccctgcctgatcaagcacaagttactgtctgccaaaaatgggtagtaccgccactaaatgaggttgaaggtgaagaaaatgaactcaagcatcttgtcgctgtttctgaagttgagaaagaagaatggcgacaacccattatcgactacttgtgctatgggatacttccagaaaatccgaggagaaggactgaaatccgctgtcgcgcaccccgcttcctttactacaaagacactttatacagaaggtcattcgagggagtactcttgcgatgcttaggggaagaagaagcactccaagctttgcaagaggcacattctggggtatgtgggtcgcaccagtctgggccaaagctccacttccatataaaaaggatgggatattattggccaacaatggtaaaagattgcttggactacgctcgaagatgcaaggcttgtcaattccacgcgaattttattcatcaacctcctgaagtgttgcacccgactgttgcatcctggccatttgacgcctggggattggatgttgtgggaccactgccaaagtcttctggtgggcacctatacatcttggctgcaactgactacttctcgaaatgggccgaagctgttgctcttaaggaagtaaagaaggtcaacctaacataaagataaaaggggagataattctaatagcctaatctaaacaaaacttgtaattgatcaattcttgacaactagtctccaggttcttcttcttctcctccaaattggtcgaatcttcatcagtcagcaaatttgcgttgtcatatgaagaaacctcagactcggcagccgaaacttttgcttgaatctcttcaacctccttttgggtcttttctataacgccttcgaggttccccctctcttgttgtaatgtctgcaatttcttcaaaattctcttcagtttcttttcactagaggagactttcttgactttctcacttgcttcaagtttgaacgattcgagacgctcctgagctttggaaatcatctccatcttctcatcttgactcgtcttctcagccaatttggatcgctcttggtcatatgaggaagcaagctcgaaaaaagaatccagtaaacactctaatggagaaagatctgaaatattcgcctttttcatatcctcaaaaatctcagtaatttgctccctataggatgagagcagttctgcacgagtcttggagagtctattgcaaatatcctcccaaagtcccaagacgaattcctttttgcgattaaagacaatgctctttccttcaaaaatagatattgttgtatttgtcagcggtggaatgcgagttacctcattctgagtttgttggtttagggctctgtcatgaggaagaaatgatgcatttgaaggtgacctcactttagacgtaggccctccaatagattcatcactcacttgcggctgctcatgtggggatactaccggatgcccaatgacatttaactgcataaggaaaaggcaaagaaagtgaatattttttttaaaccatcgtttgttaaaaataaataaataaataaagggtaaggtgattgtatttttacctccttgttacaagctgtaggcgttcttgagggactatcaacacttggaacctctacaatctctattgggttaggccgtttccttttccaatttcgatcttcattggtactctgacttgtatcttgaggaacttgcgtgctaaatggaagaactgaagggtgcttctctaaatccgctgaagtgcacaccacctctttcaaagccgtcttggaggatttaagcttccttttcttatgttgtgtagctactttcgggattggagtacgtggctctttaactttcgggagcgtctttccaacaccttgatcttcacctcctaaagaaatagtagactttagcccaatattatctaccaaagcttgtaaattattctcgagaaacttcccatgcgctttctcccaccaagacatataattggtggagaaaggcttctccacaggatcgcccgttgggggaaaaaccgcgcgggacatagaccgatacagcgtacaaatcctccaaaatctaagtccttcatctagagaggcgttacgaatatcattctccaaaaaaccggggacgttctggtaaaatccaaattgacgaccaaacctatgtgggctatagggctcgatgataaatgagttaccatacctcaaagggaggtaactaaaacgtaagctcatgaagtaattggactccaactcttcaggggcattgttatccacataataataaggacgagaattggttaacattgttggtgtccaaactatatcctccccggtgtggatgcatttcctcgcgtccttcccatcaaagtacctcgcagctccctctcctgagtataccaccatcaaagggacagacggacccttagcaagtggatagtgggttttgaagtaatgtgcaagccaaccataaacataatggatggggaaacaaactttgacctgatcaagttgggaagaacacgaaatcttattcaaaccattataaatcctcgccaaaattgggatcgcaaggctaatctttcgcccgcctgccatcatgcttgccatcttaaaagtctcgggacgaatgaagttttctgccttgggaaacacgaaggcacatagccaaattgataagaatgctgctacataagtttcatctttcttgtcagccctcaccctaagcttggagaatgtaacttcttgatcactcgaccacctcgttgtctcgggaataactccgttaggattatgtgtcgactttaggcgcgcagatttcttttcctttcgaagtggggcgggtttatatattaaagtctttttataccaaaaatttgtccacttgttgaaagagaccctttggttagcacccgtaccttccttaaggtaatgaaaggcagcaaataaatactcgcaagatcgagggataaatctcatctgtttttcgtccaaaccgataagttctcttatctcaggtaccacttcttcataaggagaacccacaatgggcagacctccaaggatatgtaagtcccaaagagagatagaaagttccccagctgatgtaagaagcgtgttcgtcttggggcaccaagcctcgcaaaatgcttgtaaaatgttcgagtttcgatcataagtgaaaagtgaagcatatacagcatcataaatctttgctgtactcagggtttgttgacttccaccaagtacatcttcagcccattcccaatatcctggaatgtgacgatactcgccctcgattgttgttgtgcttccccaacgtacttcgcattgaattatgcgacgtcctaagcttggaaaggtgctagcaatgtttacgtggcgatggattggcgcttggagagaccacatcttggacaatggattagaagttgacttgtgctctaaggtccagttttctacatgaagagagtttctcaaagaaggccatgaggctgcataccggccagcttgcggggcgtgaaccaaaagcttcgtttgttctgtgtcatctttagtctcgattatgagatatctaagtttggaggaaggtgaggtatagtctctgaaactttccatctctcgagctgcaaaaaaaaagggtcatcaaagtccaaatcaagaatattaggatgagcacaaaggcctaaatgagtaaaatggcctctggtagtcgggccacattgagagtaatctctccgatagtcgagatattttgagagtaatctctccagtagtcgggtcattttgagagtaatctctccgatagtcggtcacattgagagtaatctctccgatagtcaggacattttgagagtaatctctccagtagtcgggccacattgagagtaatctctccgatagtcgggaaattttgagagtaatctctccagtagtcgggccatgttgagagtaatctctccgatagtcggtcacattgagagtaatctctccgatagtcgggtcattttgagagtaatctctccgatagtcgggccacattgagagtaatctctccgatagtcgtgctatattgagagtaatctctccgatagtcgggacattttgagagtaatctctccgataattcgggtaaggatgcatacccatcccctcacgccctaagattgtctccatcatgcatggatcatcttggtaaacaagaacaaatccttcttgttaacctacaaaaaaaaagataatagaataaagaagcacaagaaaataagaagaaattaccttgacgtcaatgcttccaagtcgtcaaaatagactcaaagtggtttgcaaacgctgaaagtgatgctaatagaatgaaaagtataccgtatttatagatgtcaaaaggtgataattgaaagaaaagtaccgatgtgggatcaattattaggcaaaaaaaaaaaagcaattcgtgttgaaatcgaatagcaattcgagttgaaatcgaatagcaattcgagttgaaatcgaattgcaattacgaattgcaattcgagttgaaatcgaattgcaattacgaattgcaatctgacgcctacagtagccacgttagtcttttaactacataactttggtattttaggtagaaactaaatcaatttcttttttttcctttttttaattttaaagaaagtgctaatcattttttttgcgtacttatcctttgaagagttgttggtcatccaaggttattcaataatttcaattatatgagatgacaccaaataagtgatacaaattgtatctggaccaagaatgcatgggatgctacgtagaatttgaagactacggcacgatggaaaataaatgatgtcgtaccaatacttcaagccttgtctcgtatttaaaaaatctacgcattgacaaaccttgaagtagagggcatttgtaggcgtataaattttattaaaattaattccataaaggaatttggattatattttaaattcaagatatattagtccaaataaatactactgactaatataattgaattaattatataagtccaatatatatggattaaataaataattcttaatccattgggctagcccatttagttgggctaaattgatgagcccacttcattaggcccaatataccatcttcctagaggcccagtgccacatgtcaaatgacgtggcatgccaagtcaaataaaagagccaataggaccatgccatgtgtcaaaatgacacagcaggacaagtcacattaaaaggccaatgaaatcgcgccacgtgtgcaagtgacatgttctggccaatcaaatgcggccttgtcacacttcaatttgattggtcgaaaagagtttgttcttatcataactcttccctcccacaactataaatagggatcttcataactcagaaaagggaccagaagttataacaagaagcaagagagagctcgtggatcagacgctgcaaatttctctacaagtttcaagcttcatacaatcaagttcaagttcaataaatcaagttcaagctcaagaacgaagaacaattcaagtattcaagatcaagaacgaagtcaaatcaaatacaaggcgttcaaaatcaaggctacttgttcgtgatacaattcgtggcaacaatcaaagtgttcgcgacggataaatcaaattcaaattcgagatcaagctcaaaggcccttgaatttatactagaaaagtagaatcagaggattcatagagattgtaacgctcaaatatttgaaatcgaatactacgattgtcgcaatatttttcggtcttgattttattttcttgacgcaatttattgtctacaatgacataagctcgaattggatcaaatttttaaagttcaattttgaattaatcagtttggatatattaatatttaattttgagcctataagttgatctacttcttcttcttacaaaaatggacatctaaatgacatatttgcctaaatacctcattctcactgtaatttttcaaataaagtatttatgcaagtagtaaaatcattatcaaaatatacaatagagacattagtaaggccgataagaattagtaattataataccatattcaaatagacttagtaatttttattttaaaaaaataaaatcaccactggagggtgtcacacctcttttttcactaccccggattaatgaaggggtaataagggagtttttccactttaagtgacattattcagatttgggatttattttagttttcagagtcgccacccggatttttgacgatgttccgggacaccgttttattgaaatcccaaaccgaggaaatttagactctgttttaagttgtctgcgaccaaaaattcgagtaaggaattctgttaatccgggagaaggtgttaggcattttcgagttccgtggttctagcacggtcgcttactattaatatttggcctaagttatctgattatttacatattttagcctattatgcgtttagacctttaacttttaaccgcttttagtgtttacgaatttatcttgaaataagtcacgatgacatgcacttatttatttttggacacattgtaactgcgccacatgaaatgcacccgtgattacaatatgtgatttttattattactttgagttagagtcggggacttgctacacccgagtgtagattatatagtcatgactatggtcatgacggttaaaaatgcctatttgaggcgatactcaattattctctaagttttaaattttttaatctaaaagaggtatttttagcttacgtgatatgtatatataaactacttgtgatatttatggatttatcttggagcaagtcacgatggcgtgcacttgtttttttggacacatcgcaaccgcgtcacatgaaatgcactcgcgatttactacatggttatttttattattgtttgaagttagggtcgggtcacatgaaatgcacatccgaaatggggattgtgtatcacgactatgccacggaagtcgtacccataatcatgatgatttaattatgtgtctaaagcaaactacgattgttcataagttatttcctacatttgagagaaattttaaagaccagtgtgttatggaatttgcttgaacaagctgcgatattgcgcactcgtttatctaaggaatttcaaatagggaagttgatatatctgcttcacctagctatcaacattgcatatttccgatagtagaacagaaatgcatctgcgggaaaagaaatatactagattcgtttacctatttctttagataaaatacaaaatatgttagaactacttcaaagctagtagcactgctttgctcttcccatcaaccacaaagttgaagaggaataaaaatatctttaccttttagtattaaaaaaaattcaattgcactcaaacagacaaagaaagagctagattttaaatgtcaaagagcacttttgattgctcccaagtttcttaacaaattccttctttctaagttatcaagaaagacaaaaccaacaatgaaagaaggatcttaaacaatacacctacttgaaacattctattcaatcaagccaaagagatgtatacaagaggcaatcaaatttctctggcactccactaacacttagatttaacataaagaaattacatgcctaatgaagagttcaaaacagtgaggtcttaaggttaaattatgaattgcaattcaatgtatctaaaccaaataaattcaagattataaatatttaatcacagaaatatcacaggacatttagcagaaaaagattcaaattgaataaacttaaatagacaagagaaaatgaagaaagagcctgttaaacaaacttttttttcctttcaatatatgagaaatagaacttctgaagcagcttcacaaaagatggaaatctgctaaaactgaaattcctctaattgacaatggaaaacttagcaaatgtacacttcctcgatcccaaaagtccaccgagaaacaacaataaaaaccgaacgggggaaccggaacccggaatttcacctcaaattctcaaaacctttgatttccctttttccgatttctgtccaaacacttctccattttttataattgttttcaggttgttcaaagaaacatggaaagaaaaatgaaagaggatgtcacaggaagtagcagcagtaacaatcaagccttttgttcatttttcctaaaagaaattcgaactctactgtttgaggtgtgtgcgtgtgtggattgcagctgaaacttggttaggggaggtgttgttgtctgtctaggttgtcgatcttagggggggagggaggaagacgatgggaccaagggcaaagcgctatagggataggatcttttttttagtccctttttgtatctaattaggtatctattatatagaggtggtgaataagattgtaatgtggcaaattttgttaggtctggattttgggctctgaatttaggtcaatttgaaacaagagcaaattttatctttcaaaaatagtcatattactactaattaaatttcttttatcaaaacgacctaattaacattttaactaattaaataaactaattgattaagctaatatatattttttgtgacttttatatattattctatcaattaaaggataattaatttttaaaaatgcgaattaaacctaagattacatgaaatgaaaaaatgtgacaattttttatgatttttctatgattttgaaatattaaacatgcataaaatgcaactaataaagaaaaattcctaaaattcattaaaagttattttttgattatttttaggagtaattttcatgcggcgcaaaaattgggtgttcacagctgcccttctttgctcgagaacatgaagggttttcgggcaaagataaagtgagaaaccacgagcaatttttgcccgtttggtactccatttggaagcattttgaaaaaggtttgaccgaatcttgcttcggaggttgcctacatatccttggctataaaggaatcaggttagtgtagttctggaaggtttggagtgatgagttcgagagtcgagcgaggttctgtccgaggctcccgttcatggtcttgctattacatcaaaatccaaatgaaaaagactaattaagcctatcagctacgagttacaagatttctatcacgggtcttctaaagcttgatcttgagtcttgactgcttctttatacagactccgatctgaatcttgatgcttgttcgttgtaggtgttggttaaatcttcttcagcttttcggatcaaggcaggatatacagaacggatgacttcaatctcgtcctgaatagtcactttggggttcaactcttttctttttcttcttttcttttattctgaattgagacgtcttcttttggtcgactcgaatccattgtcctaaaaatgcaatctgcacaaaatcaaaaagcaaacgaacgaaatttctgccccagttttcactaggaaaattttgtgagttattgtaaggaaatctatactactttattattgaaagcggtgaaaagccggaaataatgcacccagagttattgtagactagggagtggataccctatgcccaaaggtaaaatcaactaggggttggagaccctatttggaagagaattgacaggttatgctgtcgtcaagaaaagatcactaggttatgccggtgtctggaaatgagattcatcgggttatgccggcatcaactagggaatggagaccctatgttagcatcgagttatgtcggcatcaacttatgttggcataaactagggagtggagtccctatgttggaaaatcatcaactagggattggagaccctatgctggaaaaacatcaactagggagtgtataccctaagttgaaaaataaaatcaactagggattgtataccctgtgttggaatcaactagggagtggagaccctatgttggcatcaggttatgttggcatcaactagggagtgaagaccctatgttggcatcaactagggagttgagatcctatgttggcatcatgctatgctggcatcaaccagggagtggagaccctacgttggcatcaactagggagtggagaccctgtgttggaaaacgaaatcagggaattgtataccctttgctaaaacgaaccaagaagaatttttgttgtttttttttccaattttttttatatatttgagaaaatcattcctttaaacaaattgcaccaatgcatattttttgaggacaaaaataaactattttttttctcttttaaaaaaaaattatcataggaggaaattcatcagactaggttttcttatcttaggagaaagattcatcagactaagacgtctatcctaggagaaaattcatcagactaggccctttttttgttatcttaggagaaaaaaaccatcagactaagattgttgtcctaggagaaagttcatcagactaggtttctatcttaggagaaagattcatcggactaagatttcaatcctaggagaaaattcatcagactaggtctttttttgttatcttaggagaaagattcatcagactaagatttctatcataggagaaagttcatcagacaaggtcttctatcttaggagaaagattcatcggactaagattttgatcctaggagaaaattcatcagactgggtccctttttttgttatcttaggagaaatattcaccagactaagatttctgtcataggagaaaattcatcatactaggtttttttatcttaggagaaaaattcatcggactaagatttcaattctaggagaaaattcatcagactaggttttttttgttatcttaggagaaagattcatcagactaagatttctgtcctaggagaaagttcatcagactaggttttctatcttaggagaaaaattcatcagactaagattttgatcctaggagaaaattcatcagactaggtcattttttgttatcttaggagaaatattcatcggactaagatttcgatcctaggagaaaattcatcatactaggtcttctatcttaggagaaagattcatcggactaagatttcgatcctaggaaaaattcactagactaggtctttttttttgttatcttaggagaaagattcatcagactaagatttcaatcataggagaaagttcatcatactaggtcttttattttaggagaaagattcatcggactaagattttgatcctaggagaaaattcatcagactaagatttttatcctaggagaaagttcatcagactaggtccttttttttgttatcttaggagaaagattcatcagactaagatttttatcctaggagaaaattcatcagactaggtcattcgttttttttgttatcttaggagaaagattcatcaaactaagatttgtgtcctaggagaagttcatcagactaggtcccttttttgtaatcttaggagaaagattcatcaaactaagattttgatcctaggagaaaattcatcagactaggtcatttttcttgttatcttagaagaaagattcatcagactaagatttttattggaagaaaatccatcagactaggacttttatcctatgaggaaaaatgtgagaagcaatggcaatattttatgcacactagcaagacaaataaaagcaaagatttgagaaacttccttttgtcggctcttctctttagttcattcttttttttccactgctttgttcctgtttcaaataaagaaaattttgtcagctttgggagtggtggtcggtttgtggccttgagtcctgagcagcttggcttttgctcgatcagcttgagtcggtttcaagagacttttgctctgcatccaccaccgagtaccatttgtatttgtggctcagtcagccttatcccaagaggagatctttgcttaggcgaccttttctgacatcttgaatggctttttgccttttggagcaatttaactttcaaatggaatcaccagttatctttgcttgcgccaagtaggctgacaagagtctttttttgttggaggagcctttgcatgaattctcaaggcatgttgactgtaacaaatgaatgtgctggccaaattcactttgtgcaactgaaaagctgatagcagattttgaaatcttttcttgcttgttttgacaagggctgactcagaatgaaggacgcaatgatgcaaagaaacaacattgacagggaatgcccatgtcagaaggacagaaggcagagtatttttttttaatttacggtaactagccataatgatcatgacatgcattttggactcaatggccgatctatcaaactgatcaaatctttcttttcaccattcttatgacatttgaagtcgggcttgtttatgccaattcttcgcatcaacttcacgactcactttcgactagtggtgccccgaggggttttcaccaacaagtctctctcatttatttgtctcttcttaccatcgccttacggtgcccgtgaaggttttcactagtaagactctctcatttttttcttttctttttctttttcttttgtgagcaacttgacagtgtcctatgtcgcgtgacaaccgttgctccttgcatgcttctcttggcattcttgaaggcatatccggaggtctttatttggaaggtttttggatagggttggaaaggagggtcgacatgaaggcttaaagtagactcaaaatgagggggttgtagacttagaactcttggaatcgactcttttaaaagtgaaataaaatcatttccgcagtttcagatactagggatttttgtttttttgtttgtttttgaattcttatttggttggaccgaaccgtgtaaggctgcctacatatcctttttttaaaggaatcaggtctaacgtagttcaaacatttgacctaactatttttttttcatttttctttctttctctttttttttaaaaaacaaactggcccaacttccttgtttagggcatagatctcagactattctttttctcttttctcttttttttttcaaaacaaattgccccaacttttattttctgagggcatggactttgactgttattttttttttctttcatttgaactttctaagagttgccccagtttatactgttggggcatggatgttttttttcattttcattttttacattttcactctttttttgtgtggacttttgactctaaacttgattccataagagggtggtcaaagaaaaatgacaccagctcaaaaggggtagagaatggtataaagtgtttagatagaagaaaaagggcctcccagccgcgagaacgccaaaacatattatctttttgcgatcatagcgttgatgaacatgtctatcttcttagtgtgccgtggtcgaaaaacacttttcatccattaatgtcaaactttcgaccaagcttcaattgattaaacattctcaagcccgatgttcacaatgatttgaaggtgaatgttactcgaccttagttccaaagtatctcaaatctttattcatcctcaaaagtgtctctttctcacttatctcattcaagactaaatcagtttttaagatctggccaaaatttccgcatgcatgtcatatcactaaaactaacgggaaaagaactaagcatggaatgacacaaaaggacaaattgtatttcattgagttaaaaaaagataaacaacctaaaatccgagttacaaccctaaaataaacccggctaatgaaaataacaacaaaacagaccgacaagactcacacaaacagaataaagggatagaagggtttgactcaataaaacaaataaaatctggatcacaaccctgaaataacctagataacagaaaaaacatcaaaacaagctaccaagactccttcctcgtgaggagggaatgacttttcaatcgttaagcttgatatttagccacaaatttgcttatcagaatcatcatagccttctccaatttcaaaatcattaacttcagtcatcaagttcccgagaggattctcatactccctgtcaccacgcatcttccccacaaagtgtgcatcatcatatgcaagtaaaagattctgcgtgatattgtgggtgtcactgtcttggatcacaatcagattttcctggatcatcttttctatttctcttttcaaatctctacagctttcaacatcgtgcccctgggcattggcatggtattcataccttttaaaagggtaaaaaattctcgtacgtggatccacatgattttgaggaataggtgcaatcacgtcataatgctttaatttctcaaacaagcttgcatatgactctcctattggtgtaaaattgtctttaaacttttgttctcctctataccccttgtttggatgtgggttatagggcacttggacattctgtggcggctagtggagattttgcgatgctcgccttctgcggcgtcttggtgtctagacaacatattcaggtggagcaaaagagtattgtgggttctgaggtggataggattgctcaagggaatcatcggaaaacagacgaggctggtcataccttcgagatgttctcctaggacctcttctcaaccctgatgccatcatgatttcttcatctttctcattcatgtcactaaaattaccagatttaatttggacagcctgagttgtgtctttgagaactgcttggcttataattttgcctgtcttaagaccattttcaaccatttctcccattttgattgctttcgagaaggatttgccaactgcggacatcatgttttgaaaataatctggctcttgagcttgaaggaaatcaatgattagctcgtgctcatccatgggtggcttaactctagccgcttgctctctccatttaatggcatattccctgaaacttttagttggtttcttcttcaggtttgaaagggaattgcggttcggggcaatgtcgatgttgtattggaactgtttgacaaaggcctgagccatgtcgtcccagaaataccagcgagatgtgtcttgatcagtaaaccattcagagctttccccaaaataatccattagcaattcttcatttctttctgcacctcttagctgattacaataccttttcaggtgggctatggggtctccttgtccatcatacttttcaaattttggggtcttgaaaccaggtggcaagtggacatcggggaacatacatagatccttgaatgcaatacacttttgacctgccaacccttgcatgtttttcgattgttgttctaagcttttcactctttcggtcatttcttcatgtgtcatctttcgggcaggcttctcaatctttgcaggaagatcaaataggttcgagtggtactcatgagaatggtattgttcttgatgtgtagcaaattgtgattcgtgacttttcttctataccgctgttggctgtaggatagtgaagacgggcataacaacactggttgtctgatttgttgtcaatggcacactttgggagcaagcaacagaagttctagttgtagtcgtgcagttgggataaggactgaacctaggtggataggattgatcaagcaatgagaccggactggcagtagttgagatgggtgtgaactctgggaaaccatgagaagaaaagggcggtccttggccattggcccatgcttgacacatttaagccattttccgtttcaaaactctattttcctcagccacagtggactcttgttgaaccctcttgtcacgacccgaaatcccaccttcggccatgactgcgtctaacgttgaacccgctagacaagtcaatgtttgaactagataaaactcattaacaactaaaatgaacgagataactaaggcatcgatggtcaacaatatgaaggttaacaaattaattaaaaaaaataagatagcaacttcgaaataaaacccatatacaaatcccaaaactggtgtcacatactcacgaactgtctaagagattactaaaacaaaggtctgaaaataagtacatatgactgtctttgaactataagataagacagagttgaaagtgaagggtagaaggtgacgccaaggcccacgaacgtctgcgggtctacctcgatgtctcatgtatgaactgatgggatgctcccaaccgtcagtgaccaccgggtccggctgcgtagtctacacaacataaagaaatgcaggtgtagcatcagtacaaccgacctcatgtactgagtaagtgctgagcctaacctcggcgaagtagtgacgaggctaggaccgacaacaatatatgtacctgtacaattctatataataacaggaaaatatcgacggaaataagcaagtaaaacagatacagggagaacatgttaggggtaaaaggggcaacaaaatgctagcacagtggaacagggtaataactgaagtgtaaaaataataaaagcaggaatttaacgtctcaggacagataatgaacagcaaaaggcacagcatgtcccctcgtgcataatctcgcaatcactcggcacggaatgtcccctcgtgcataaatagtaacactcggcacagaatgtcgcctcgtgcaataaataatcaacgattaacacggcatgtcccctcgtgcgataaataataaatgatcaacacagcatgtcccctcgtgcgataaataataaatgatcaacacggcatgtcccctcgtgcgataaataataacgatcaatataatatgaaaatcaacaataagaagtctcaagtgaatggaaatactcaataaaattctatcgtcccggcaagtgactcagctataaccaacctagcatcagaaatactatttcaacaataaaagcctcaactgaaacaaataacacaataactccccatgtcatgaaacaacatcaaggtatcacttctaaattaccaattactcatagtacaaagaatattaagaacacggtatgattcatcacaattgactcacgagcatgcttgaccgcaatatataggcattcgtcaccccgcctatacgttggacatgaattacacatagcaaataagactctatacctaatccctcaagctaaggttaggtcaaacacttacctcagctccaaagtgcaagtcaagtctctaataccgcattttctttagaatccgactccgaaacgataatatctatgcataattaactcaataatatcaataatgactcattaacacagtcccatagcctaattatacaattcctagcattcttccaaaaataacaaaattcgaccccgggcccgcttggtccaacaagaggctcggaccaaaacccgatcacccataccccacgagttcaaatatatgatttgcttcaagatccgaccccaaattgaggttgaatcacccaaaattcccaaaagcctaactttacccaaaatccctaatttctacattgattttaggattttaggcctagattctagtgattagttgatgaaagtaagagaaaatgatgttaagaacacttacctatggagctatggagggcttgaatttcgtttatggaagtttggggaagaaggaggaagtgagaaaagggtgaaatcccgtaatggatctgttttggagttaataaaatcagtcgagaaaataattctatgcgttcgcagcctgttgaccgtgttcgcacaggtttgaccaaatagacctatgcgttcgcaggccaatagctgcgttcgcaggccaatagctgcgttcgcacaggtcaaataccactccccacccaggtcctaccttacccagtgcggacgcacccccctgcccgcgttcgcactgccccgcctaaactaccctccgcgttcgcacctgttagagtgcgtttgcactgctttgaccccacagccctccgtgatcgtatcctaagtggtgcgttcgcatagcacaatttgcatatctcccccagaccccactttactctatgcgttcacatcctaagtggtgcgttcacatagagtaaatacctggacaccagcaattcatcaaaagaccagatttttcatgacttttacaccccgttagctacccgaaactcacccgagccctcgggtctaaaaaccaaaaacacacacgactcccaaagcatcctacagacttattcaagcttttaaatcaccaaaacatcatcaaaaacaaggaattaaaccttaaaactcatagaattttcttaaaacttcataaagcttaaattttccaattttgatccgaaacacgtcatttcaagtccgttttaaactaaatttcacagataagtcacataacatataattaacctgttccggactccgaaaccataatacgggcccggtaacacggttttcacataattattcattttcaaaatcctttattattttcagaaaataattttgttttaaaaattcatttctcggacatgggacctcggaatttgattccgggcatatgcccaagtcccatattttcctacggaccctccgggaccgtcaaatcacgggtccgggtccgtttaccaaaaatattgaccaaagtcaactttattcatttaattatcataaaattccattttcatcaaatttcaacataaagacttcccggctacacgcccgggctgtgcacacatatcgaggtgagattaacggaggctttcgggacctcgaaacacagatttaccttgaattacttaggatgaccttttgggtcatcacaatctccacctctaaaacaagcattcgtcctcgaacgaacatagaaaattacctgagtctgagaaaagatggggataacgactcctcatatcgaactcggactcccaagtagctgccttggcaggttgacctttccactgaacacagaccgaaggataactcttcgacctcaattgacgaacctgcctatctaatatagctaccggctcctcctcataagtcagatccttgtctaactggacacctctgaagtcaagaacatgagatggatcttcaatatacctccggagcatggatacatgaaacactggacgcactgctgataaatgcggtggcaaggcaagtctgtaggtcacctctcctaccttatccaaaatctcaaatgaaccaatatacctagggctcaacttgcccttctttccgaatctcatcacgaccttcataggcaacacttgaaggaatacctggtctcctaccatgaaagccaaatctcgaactctacgatctgcataactcttttgcctggactgagctgtacaaagcctatcctgaataatcttcaccttatccaaggcatcctggactaactcagaacctaatagcctagcctctccgggatcaaaccatccgactggagaccgacatcgcttaccatacaacgcctcattcgaagccatctgaatgcttgactgataactgttgttgtaggcaaactctgctaaaggaaagaactgatcccatggaccaccaaagtcaataacaaaagctcgcaacatatcctccaaaatctaaatagtacgctcggactgtccgtccgtctgaggatgaaatgctgtgctcaactcaatctgtgtgcccaactctcactgaaatactctccagaaatgggaggtaaactgagtacctcggtctgatatgatagataagggtacaccgtgcaatctgacaatctctctcatatagatctgagttaacttctctgccgaagataaaactgccacatgaatgaaatgtgctgacttgatcagcctatctacaacaacccatactgcatcaaccatcctcggagtccgtgggagtccaactacaaaatccatcgtgatacgctcccacttccactcgggaagttgaatctgctgcatcaatccaccgggtctctggtgctcatacttaacctgctaacaattcaagcaccgagctacataagccacaatatccttcttcattctacgccaccaataatgctgccgcaagtcttggtacatcttcgcggcgcctggatgaatgaaataccgagaactatgggcctcctgcaatattaactcacgaatgtcatccacatcaggaacacatatacgaccctgcaatctcaaaactccctcagcatcaactgtgacttgcttggcacgtccgtgccgaaccgcatctctaagagcacacaaatgacgatcatcatactgcctggcgcgaatacgatcatacaatgaagaacgagcgacgatatgggccaacacactgccagtctcagaaacctctaatctcacaaatcgattggctaacaactgaacatccaaagacaaaggtcgctctccaactgataaataggccaagctacccatactgaccgacttccggctcaaagcatcggccaccacattggcttttcccgggtgatagagaatagtaatatcataatccttcaacaactctaaccaactcctttgcctcatgttcaactccttttgcttaaacaagtattgcaaactcttgtgatcagtgaatacctcacacggtaccccatgcaaatagtgcctccaaatcttcaaggcatggacaatagctgcaagctccaaatcatggactggatagttcttctcatgaatcttcaactgacgagaagcataggctataaccttcccattttgcatcaacactgcaccaagcccaacccgtgaagtatcacaatacacggtatacggtcctgaacctgtgggcaacactaacaccggtgccgtggtcaaggctgtcttgagcttctgaaagctcgcctcacactcatccgaccacctgaactggggacccttctgggtcaacctggtcatcggggctgcgatagatgaaaagccctccacaaatcggcgataataacctgctaagcctaagaaactccgaatctctgtagctgaagtaagcttaggccaatctctgacttctgaaatctttttgggatccacctgaataccctctgccgacacaacatggcccagaaatgccaccgaactcaactagaactcacacttagaaaatttggcatacaactgactatccctcagaatatggaggacgactctaaggtgttgctcgtgctcctctcggatgcgagagtatatcaatatatcatcaatgaaaacaataacgaacgagtccaaataaagcctgaacacccgattcatcaactccataaaagcaataggggcatttgtcaacccgaatgacatcaccaagaactcacaatgcccataacaagtgcgaaaagccgtcttaggcacatcagacgccctgatcctcagctgatgataaccagacctcaagtctatcttagagaataccgcatcaccctgaagctgatcaaataagtcatcaatccccagcaagggatacttgttcttgatggtaaccttattcaactgccggtagtcaatacacatccttattgagccatctttcttcttcacaaacaatactggagcaccccaaggagaaacactaggcctgatgaagcctttatccaacaaatcctgtaattgttcctttaattccttcaactctggcggagccatacgatacaggggaatagaaatgggctgagtgccctcagctaactcaatacaaaaatcaatatccttgtcgggtggcatacccggaaggtcagcagggaatacctctggaaactcacgaatcacgggcacagactctatagaaggaacctcagcactagaatcacgaacataggtcaaataggccaaacaacccttctcgaccatgcgccgagtcttcatatacgaaataactctaccagaagaatgattaggagtctctctccactctaaacgaggtactcctggcaaggctaaggtcactgtcttggcatgacaatccaagatagcatgatagggggataactagtccatcccccatataacatcaaagtcaaccatatcaagaagcaaaagatcaacctgagtctccagaccaccaataactactacgcaagcacggtagactcgatctaccactatagaatcacctaccggtgtagacacatgtacaacagtactcaaggaatcacggggcatactcaaataaggggcaaaatatataaacacataggagaatgtagaacccggatcaaataacactgaagcctcttggctgcaaactgagaccgtacttgtaataactgcgtcagaagcctcagcatcaggacgagcaagaaaagcataacaccggggctgagctcctccaatctgaacatccctgggtctacctgctgtaacctggcctctacccctcccggcctgtgctccacctctatgaacctgaacaccacctctggcacctcgaccactacccctagctggctgagggggcgaggctgcacctgatgcggaaaccatggcatgggaaccctgatactgagaaccaccaaaacctcgggggcaaaacctagaaatatgccccataccaccgcaagtgaagcaagacttcggctgctgagaatactgaccctggaactgtcctttacgaccaaaatgaccactctgatagctctggatcgacggtgcactaatgggagctgaaggtgcactgcgagatacctggagtgccgactgataaggcctagggggatgaccactgccaaaggaatctctgcctccagatgaggcaccactgaaacggccgaaatgacgaggtctgttgtcagacccctgtccaccaccctgggataataccatctcaatgcgcctggccacatcggctgcatcctaaaaggagatatcagtacccgtctctctggccatctgaagcctgatgggctgagctagacccttaataaatctccgaaccctctcccgatcagtggggagtatcataatggcatgcctggccagagtaatcaacctggtctcgtactgagtgacgaacatggagccctgctgtagacgctcaaactgcctccgaagatcctctctttgagtaactggaaggaacttccccaagaacaactcggagaactgagcccaagtcagaggtgcagacccagctggtctggtcaagcagtaacctctccaccaagtcttggcggtgccagaaagacgaaatgtagcaaaatcaactccattggactccacaatgcccatgttccgaagaacctcataacaactgtctaaataatcccggggatcctctgatggtgaaccagtaaatgtagtagtgaatagcttggtgaaccgatccaacctccacagagcgtccgttgacatggctgctccctcaactgctggtgccacaatacccggctgaactaatccggctgtctgaggtgccggagtctggaactgagtggcaaactgctctggcgtatgaatagcaggagtctgggtcactcccccagcctgagatccacctggtgcagtaggaagaagactgacgtgagtcacactctccatgagtccactaagtggactagagcgtcctgaagcactggggtggcaatgaacccctctgggacctgagctggtcccactaggactgtctgagtaggagctgttgcaaagtctacatgtgggtcctctactagagttgctgctctagctctgcctccgcctctagcacggcctcgacccctcgtaggagctgcaataggaggatcaggctgctggtcggtcgatgaggaagcgcgcgttctcgctaactgcgagagagtaaaatagagactcaattagtatttagaattcaactagcactactgagaatgaaagatgtgaagtaattcctaactttgcagcctcttgggataagtacagacgtctccgtaccgatatctcagactctaccaagtttacccgtgagttgtgagacctaagcaacctagagctctaataccaacttgtcatgacccgaaatcccaccttcggccatgactgcatctaacgttgaacccgctagacaagccaacgtttgaactagataaaactcattaacaactaaaacgaacgagataactaaggcatcgatggtacaatatgaaggttaacaaattaattaaaaaaaataagataacaacttcgaaataaaacccatatacaaatcccagaactggtgtcacatactcacgaactgtctaagagattactaaaacaaaggtctgaaaataagtacatatgactgtctttgaactataagataagacagagctgaaagtgaagggtagaaggtgacgccaaggcccacgaacgtctgcgggtctacctcgatgtctcctatatgaactgatgggatgctccgaccgtcagtgaccaccgggtccggctgcatagtctgcacaacatgaagaagtgcaggtgtagcatcagtacaaccgaccccatgtactgagtaagtgccgagcctaacctcggcgaagtagtgaggaggctaggaccgacaacaatatatgtacctgtacaattctatataataacaggaaaatatcgacggaaacaagcaagtaaaacatatacggggagaacatgttgggggtaaaaggggcaacaaaatgctagcacagtggaacagggtaataactgaagtgtaaaaataataaaagcaggaatttaacgtctcaggacagataatgaacaacaaaaggcacggcatgtcccctcgtgcataatctcgcaatcactcggcacagaatatcccctcgtgcataaatagtaacactcggcatggaatgtctcctcgtgcaataaataatcaacgattaacacggcatgtcccctcgtgtgataagtaacaaacaatcagcacgacatgtcccctcgtgagataaataataaacgatcaacacggcatgtcccctcgtgtgataaataataagcaatgagcacggcatgtcccctcgtgcgataaataataacgatcaatataatgtgaaaatcaacaataagaagtctcaagtgtatggaaatactcaataaaaaattctatcgtcccggcaagggactcagctataaccaacctcgcatcagaaataccatttcaacaataaaagcctcaactgaaacaaataacacaataactccccatgtcatgaaacaacatcaaggtatcacttctaaatcaccaattactcgtagtacataaaatattaagaacacgttatgattcatcactattgactcacggacatgcttgaccacaacatataggcattcgtcaccccgcctatatgttggacatgaattacacatagcaaataagactctatacctaatccctcaagctaaagttaggccaaacacttacctcagctccaaagtgcaagtcaagtctctaataccgcctttcctttagaatccgactccgaaacaataatatctatgcataattaactcaataatatcaataatgactcattaacacagtctcatagcctaattatacaattcgtaacattcttcaaaaaataccaaaattcgactccgggcccgcttggtccaaacacgaggttcggaccaaaacccgatcacccataccccacgagttcaaatatatgatttgcttcaagatccgaccccaaattgaggttgaatcacccaaaattcccaaaagcctaactttacccaaaatccctaatttttacattgattttaggcctagattctagtgattagttgatgaaagtaagagaaaatgatgttaagaacacttacctatggagctatggaggttggagggcttgaatttcgtttatggaggtttggggaagaaggaggaagtgagaaaagggtgaaatcccgtaatgggtctgttttggagttaataaaatcactggagaaaataactctatgcgttcgcagcctgttgaccgtgttcgcacatgtttgaccaaatagacctatgcgttcgcaggccaatagttgcgttcgcacaggtcaaatatcactcccccacccatgtcctaccttacccagtgcggacgcaccccctgcccgcgttcgcactgccccgcctaaactaccctccgcgttcgcacctgctagagtgcgttcgcactgctttgaccccacagccctccgcgatcgcatcctaagtggtgcgttcgcatagcacaattaccccagctcccccagaccccactttactctatgcgttcgcatcctaagtggtgcgttcgcatagagtaaatacctggacaccagcaattcatcaaaagaccaaatttttcatgacttttacaccccgttagctacccgaaactcacccgagccctcgggtctaaaaaccaaaaacacacacgactcccagagcatcctacggacttattcaagcttttaaatcaccaaaacatcatcaaaaacaaggaattaaaccttaaaactcatagaattttcttaaaacttcataaagcttaactttttcaattttgatccgaaacacgttatttcaattccgttttacaccaaatttcacagataagtcacataacatataataaacatgttccgggctccggaaccataatacgggcccggtaacacggttttcacataattgttcattttcaaaatcctttattattttcagaaaataattttgttttaaaaattcatttctcggacttgggacctcggaattcgattccgggcgtacgcccaagtcctatattttcctacggaccctccgggaccgtccaatcacgggtccgggtctgtttaccaaaaatgttgaccaaagtcaattttattcatttaattatcataaaattctatttttatcaaatttcaacataaagacttcccggctacacgcccgggctgtgcacacatatcgaggtttaacggaggctttcgaggcctcggaacacagatttagctagaattacttaggataaccttttgggtcatcacacctctgaccctgaatctcatgagcactcgtaacagcttcaatttcacttgtcattttttccttggattttgtgttgacagcttaccacaaaccgcccacctcaaactatcttcacaattcaaaacaaaagacacgttagaatggacttagtcggtccttattattatcactttttttctttttctttttcttcttttttttcactttctttttctctctctttttaaaatttttatggttgtgatcgaatccgatggagattgcctacgcatcatgacgccgcatgaatcagatcttgcgtagttcgggaagattgagaataaagtaaataaccaacctaactcttttgttttttttaatgttttttttgaatttccgaaaggacttttaaagaagaaagaaaatattctttttttgtttttttttttcttttggatttcgctttttctttttggaacttcgagagaaaaacttctaaagaagagaggatttttaaattatttttttttttgattttttgatttttttttcaaaacttttgaaagaaagatttctaaagaagaaagaaaatatttttgggatttttcaaatttttattgaatttttggggacaaaagatctaaaaaaatagaatatataattttttttgaattttgatttgattttcttttcgaaagagagacttctaaaatgaaaatatattttttggttttaaattttgttatttggggactttctaaggaaaaacttctaaagaaggaattaaaatttttttttctttgtttttgaaagttggggtcttaaaacaaaagacttttctgtagaaggaagtagaaaaaaatatttttggatttttgaaaattgaagtctcaaagaaagactttccatagaaggaagtaaatgaaaaaataattttttttctttttcgattttcttttttctctggaaattgtgaaaaataaaaggtagaaaatattttttttgggattttgatttgatttgtcttctttctttttttaatgaaagatttctacgaagaaaaatattttttgggtttttaaaaaaaaattcttattactttatttgagattttctataaaaaacttctaacgaaggaactcaaggaaaatatttttggatttttaaaaataggggccgaaaccgatgaggtttgcctacgtatctcacatccggtgagaatcagactcgcgtagttctgtcaattttgacggaaacgggaaaacatgatattaacttattttcatttttcttttgaaatacattttctctttctccatctttcaaaattttggcagagtttcatgacattttcaagtatcggggttttcaaaaatcgtgtaaattttctatcctatctcacccttggtttttctactattttttctttattcggtcaacaaacaagctgaaacaaaatattgtacatatagcaggtaagatgcatcaagatggtcttttatttcgggttcacctgtcctagacggaccaacccctgtgttgagtcccctaagtcaaatgcatgtgatgcaaataatcgttcctactagggatccggcatgaggctatgttatactaggtttatatcctgggtttttgttctagacaaggcttacccgagcgtacagctcgagccgaggtcggggcagcgtaccgggaatacagaagcttcaccgtgcaacttttccgtaccccgttctaaaatttggatgactctaacagaaaagaagtcacacgaagtgcacacttcccagatgatttagaaggctcacggagaagaagggtttcaacatagttttatacgcagttcagataatatcaaagcggtaaatgaggaaattagcacattaggtttaaacacgtaaaatcagataatgaaagccaaaatataactgttatataggcttgaattcttgaaccctaaatcagagattctgggttcgatctgcagcagagtcgccagagctgtcacatctcatttttcactatccccggattaatgaagggggtaataagggagtttttccactttaagtgacattattcggatttgagatttattttagttttcagagtcgccacccgaatttttgacgatgttccgggataccgttttattgaaatcccaaaccgaggaaatttagactctgttttaagttgtctgcgaccagaaatccgagtaaggaattctgttaacccgggagaaggtgttagacatttccaagttccgtggttctagcacggtcgcttactgttaatatttggcctaagttatctgattatttacgtattttagcctattatgcgtttagccctttaacttttaaccgcttttagtgtttatggatttatcttgaaataagtcacgatggcgtgcacttgtttatttttggacacattgtaattgcgccacatgaaatgcacccgcgattacaacatgtgatttttattattgttttgtgttagagtcggggacatgagttgccacacccgagtgtagattatatagtcatgacggttaaaaatgcatatttgaggcgatactcaattattctctaagttttggaatttttttattatctaaaagaggtatatttagcttacgggatatgtatatataaactacttgtgatatttatggatttatcttggaacaagtcacgatggcgtgcacctgttgtttttggacacatcgcaatcgcgtcacatgaaatgcacccgcgatttattacatggttaattttattattgtttgaagttagggtcgggtcacatgaaatgcacacccaaaatggagattgtgtatcacgactatgccatagtcatgatgatttaattatgtgtctaaagcaaactacgattgttgataagttatttcctacatttgagagaaattttaaaggtcagtgcgttatggaatttgtttgaacaagctccgatatcgcgcacttgtttatctaaggaatttcaaacagggaagttgctatatctgcttcacctagctatcagcattgcatgtttccgatagtagaatagaaatgcagctgcgggaaaagaaatatactagattcgtttacctatttctttagataaaatacaaaatacgttagaactacttcaaaactagtagcactgctttgctcttcccatcaaccacaaagttgaagaggaataaaaatatctttaccttttagtattaaaaaagattcaattgcagtcaaacagacaaagaaagagacagattttaaatgtcaaagagcacttctgattgctcccaagtttcttaacaaattccttctttctaagttatcaagaaagacaaaaccaacaatgaaagaaggagcttaaacaatacacctacttgaaacatctattcaatcaagccaaagagatttatacaagaggcaaatttctctggcactccactaacgcttagatttaacataaagaaattacatgcctaatgaagagttcaaaacagtaaggtcttaaggttaaattatgaattgcaattcaatgtatctaaaccaaataaattcaagattataaatatttaatcacagaaatatcacaggacatgtagcaggaaaagattcaaattgaataaacttaaatagacaagagaaaatgaagaaagaacctgttaagcaaacctttttttctttcaatatatgagaaatagaacttctgaagcagcttcacaaaagatggaaatctgctaaaactgaaattcctccaattgacaatggaaaacttagcaaatgtacacttcctcgatcccaaaagtccaccgagaaacaacaataaaaatcgaacggcggaaccggaaaccgaaatttcatctcagattctcaaaacctttgatttcccttttcccgatttctgtccaaacacttctccattttttgtaattgttttcaggttgttcaaagaaacatggaaagaaaaatgaaagaggaggtcacaggaagtagcagcagtaacaatcaagccttttggttgacttaatcttcatttttcctaaaaaaattcgaactctactgtttgaggtgtgtgcgtgtgtggattgcagctgaaacttggttaggggaggtgctgctgtctgtctaggttgtcgatcttagggggtgagggaggaagacgatgagaccaaggggaaacgcgctatagggaaaggaagatcttttttatagtctctttttgtatctaattaggtctctattatatagagaagaatattagggttgtaatatggggaatttggttgagtctgggattttgggctctgaaattaggtcaatttgaaacaaggacaaattttatctttcaaaaatagtcatcttactactaattaaatttcttttatcaaaacgaccaaattaacattttaactaattaaataaactaattgattaaactaattatattttttgtgacttttatatattaatctatcaattaaagagtaattaatttctaaaaatgcgaattaaacctaagattacatgaaatgaaaaaagtgacaattttttttatgatttttctatgattttgaaatatcaaacatgcatgaaatgcaactaaataaagaaaagttcctaaaattcattaaaagttattttttgattatttttagaagtattttcatacggggcaaaaattggatgttcacagtggaagtttaggcctttttcaacctgtatattatcaaaaataactattacacggaaaaggacataaaccttagtctccatagcatgatgaagaatgatagctttcattcttataaacatttgaacacaaaaagcatgactaaattaggaggggtcctcctgtgcatttttagctataaacaacacaaaaagatgctatgtacacagcaagcaggactatacaagatctcacaaaatgattcttccttgccttattctgaaatttgggatgttacggtccaatctcaaatttgcttttactaactcaggtaacgagctagcttcttcaaatatgacttgatttctcacacttttcccatattttgcaagttgatcaacaacattattaccctctctgtaagtatgaacaaaaacaaaattagctttactccaaagttcaatgatatggccgatgatatctttgcacggccaaggaggtttcattttgttgttaatcagattaaccaccaactgggaatcagttgcactataatataaaaagatattcttcggatacaaagttttagcccatgtagtatagctttagcctcagcaaagtttttactactctggcctaatattttgcaaatgccaaaataaaacatccttgtttatctctgaaaatacctccacagctgcctagatttcctttggagcagccatcaatatataattttagccaaccttcctcagatttcttccacagtatttgttttccatcttcacagagtaggcacaattcgccccaatgttgatataagtgtaattaggaaattgactattcataaagatagtcatatatttgcacgcttgcttaataatgaaaatccacgacatattaatattttcaaatttagcagcacatttacttttccatacctccaaacaagcaattattggtaggcattgcaaaagtactgcatgaactccattttttgcttatgaaagccaccaagacataagaagttgcctgatatctccgtctctttctgatgacccatgggttctgcatgacccagtcgcgaacgcatagtgaaaataggcggggggtcatttttgctctatgagaacgcggttggggccccacgaacgcatagagttagttgggcctgggggagccgcctggctttgctctacgcgaacgcacctctgcaaccgcaaacgcagaggccaaggagctaaagctccgtgaacgcatgccttgagacgcgaacgcataggtctggggccatgaccctatgcgaacgcggccactgtgctgcgaacgcgaaggtcaccggcccagcaatataaaaacactttcaaaaacgggcagaaccctttcttcttcatattttcgaaccatacgatatagacgaaacgagcaaatgcataacttccataagtgactgtattcataggagtattagaggtgcctatgttcttgaattcctatgtatattattattacatcttctgttcatgggtctcagaaagacgtcagttgataaattttatttcataatattaattagaggcataatggtctcatgtgacatcccgcatttttgtatgttaaaatttcggcgtaagctaatcgacgtaaattcgtgaaggttagggtaagcaaatcaaagaaaataaattttcttcaaagtttaacatgttgggataaaatatgacccgagctaaaatacccgatattatgaactagtgctatacaaggtaccacatgaccataatagtaatatgtataagatgtgctatgtatgattcacgaacgtgtggagctttatgattcacgaacgtgtggagctttatgaccgagtcagtccttatgatccacccttatgacttcggcgatagtcttgtccgtgtcggttatatatatatatatatatatatatatatatatatatatatatatatatatatatatatatatatatatatacgcattgcattcatccgcatttgcattgagttgggatcatacgaggttgagttgagaaacaatacagagtactgggaagtgaacaattgagaataaagataagacatttcggataatgagaaagagaaccagtaatataactatgaatagcttacaaaggaagactatgtttgagatcagttactgattgttgcttaaatgttcttatacttgatgtactttctcatatgatttattgctcagcatgtattttattttattatgtactggaccttagtgagtatgtattctacctctcgtcactactctttacgagtttagacgggatactcactgggtacatatgtgattatatgtactcatgctgcactttctttctttttctgcacttgacagtgcaggtgttgaggctggttcatctgttcgtctgtcagctgataggtactgatcgcggcgtcgctccacaaggtgagctgtcttcttggcattttcctgacagcacctctggagccttctagtttcattttgctcagtcttttgttctagactgcggcttgtatattttgtatatgtatttctgctattgtatctatgtagccgcccgttgacactgtgacactagtcctgacacacacttgttgtagttatcggggttgtatatgtattgggcctagctgtggtccagcttgtttctacagccttaccccatattgttattatattccgcatttttattgttattgttgttcgttggcttgccaaacctcgccgttaggcgccatcacgacctggaccggttttgggtcgtgacagagtggtatcagagtgcttaggttcacatagtctcacaagtcaccgggcaactcagtagagtcctgcggatcggtacggagacgtctgtacttatcttcgggaggctatagagtgttaggaaactccttttgttcaaaatctatcgtgcagttggacttatactcaatttgttcttctattctctcacagatggtgaggacacgtgcttctcatgatcctaattcaggggaggctgctacccctgccgctcgaggacgaggtcgaggcactcggggtagggctcctgctagtaggagggggcgagggcgtcccagagctacaccagctgcaccagtggatgatcagtacattgatgagaaggaggagctgcctccagtagcaccacctccagtggactttatgacggcacctggcttctaggaggtcatgggccgcatgctgagattcatggacacgatgtcggaggcaggcatccttccatcagatcctgccacctctcaggcaggaaggggagttccgacccctacaactcagactacaggaccacagtgtactccatatattccatcagttgttagggctcagtctgggttagaggcatcaggatccaggccagttccgagaggggatcaacataagttattgggtagatggacacagctacaccctccattcttcgggggtgagcagggagaggatgcccaggactttctagagaggtgtagggacagactgcacaacatgggtatattggagtctcacggagttgatttcacttccttccagtttcaaggcagagctcgtcggtggtggcagtcgtatttgctgggtaggccagccgattctccgccagtcacttgggatcaattctcccagctattcccggataggtacattcctccatctgagagggaagacttgcgggctcagttcgagagactagagcaggggcacttgtcagtgacagattatgaggctagattttcagagttgtctcgtcatgtcatcatgatactacctacagatcgagagagagttcgtcggtttgtagcaggtttgcatcctggcatcaggacttctttagctagagaggtggagatgggcactccatttcagatagtggttgaaatagctcgtcgtatagaggactatcgtgtcagggataggagtcaaggtcagtgagggcagcaaggacaccatggaaagagagctagattcaccgaggacttcagaggtacatcaggcagggtcaagggtcagtttgctagcggtcagtccagccggtcttcctatacaacaccttcagtacctgctagggtggctccagttaggccacagttcagtgccatgccggatgtcactccagccattcagggttctcagtcctcgggtcaacaggatatgtcccaggtgaagtgttatgggtgtggagacatgggccacgtgaggaaaatttgcccccattataagggcaaggcagtgtagcagagccatcagcccagggtcccagcaccagcagctcgaccaccgaggggtggaggtcagattggtaggggccatcccagagggggaggccagccgggtagaggacattcagctctagctcgatctgggggagctcagccatcaggcgtcgcaacatgtttttatgccattccagccagggcagacgcagtagcctcagatgcagtgattacaggtactatttcagtctgtgatagggaggtttcagtgttatttgatctggggtctacatactcttatgtttcagctttattttctcattctctggatattgtatgtgagtccttgggatctcctttgtatgtgtccagtcctgtgggcgactctgtggtggtagaccgggtctaccgggcttgtgtggttactttctgtgattttgagaccaaagccaacttattgttgctcgatatggatgatttcgaggttatttggggcatggattggttatcccctcatcatgccgtcttggattgttatgccaagactgttacattagccatgcccgagtcgccgaggctagagtggagaggtgcttcagttagtactttcagccgagttatttctttcataaaggctcgacacatagtcgagaaagggtgtctagcctatcttgcttatgtgcgggacactaccgccgggtctcctactgttgattcaatacctgtcgtccgtgagttttcggatgtgtttccctcagatcatccaagcatgcctccagaccgggatgttgatttctgcattgatctagcaccagatacacaacctatatatattcctccttatcgtatggctcctaaggagctaagggagttgaaggagcgttggccaagggtttcatcaggcctagtgtgtcgccgtggggtgctcctgtgcttttcgtgaaaaagaaagatgggtcgttgtgtatgtgtattgactatcgccagctgaacaaggtaactatcaagaataagtatcctctgcctcgcattgatgatttatttgataagctttagggtgcgcgtgtgttctccaagattgacttgagatcggggtatcaccagttgaggattcggatttttgatgttccgaagactgcattccgcaccagatatggtcactatgagttcttggtgatgtattttggcttgactaatgccccaacaacttttatggatttgatgaatagggtattcaggccttatattgactcgtttgttattgttttcattgatgatatcttgatttattcacggagtttgggtgagcatgagcagcatttgcgggtagtgcttcagaccttgcgagaacaggagctatatgctaagttctccaagtgtgagttctggctagagtccgtagcattcttgggccacatagtatcaggtgagggtattaaggttgatctacagaagattgaggcagttcagggttggcctcgtcctacttcagctacggagatcaggagttttctgggtttggcaggttattatcgtcgttttgtcgaggaatgctcttctattgccgctccattgactagattgactcataagaatgccccatttcagtggtccgattattgtaaggcgagctttcagaagctcaaatcagctttgatatcagcaccagttctttcattaccttctgagtcaggtctctatacagtatattgcgacgcttcacgcgtcgggttgggatgtgttttgatgcagtatggcagagttattgcttatgcttcgcggcagctgaaggttcatgagaagaactacccttttcatgatttggtgttggcagcgatcgttcatgctttgaagatatggaggcattacctgtatagtgtatcttgtgaggtctatacggaccaccgcaatttacagtatttgcttaagcagagagatcttaatttgaggcagcggaggtggcttgagttgttgaaagactatgaccttaccattttgtatcatccgggcaaggcaaacatggtagcggatgctttgagcaggcgagcagccagcatggggagtttagcctatctttcacctgaggaaaggcctttagccttggacattcagtctttggccaatcagttagtgagattagatctttcagagcctcatcgagtcttggcacatgtggtagctcagtcttcattgcttggggagatcagggctcgacagtatgatgacccgcgtctagcagaacttcaggatactgtgattcagggcctggccaaggatgttactttaggcgaggatggtgttttgagacttcagggcaggctgtgtgttccagatgttcatggtttgagggagagaattctagcagaggctcacagttccaggtattctatccatccatgagcgacaaaaatgtatcgtgatttgaagcagcatttctggtggaggcggatgaagaaagatattgttgagtatgtagctcgatgtcttaattgccaacaagttaagtacgagcatcagcggccaggaggtttatttcagcagatgcccatccctcaatggaagtgggagcgcattaccatggacttcgtgtcaggattgcctcggactttgcggaaggttgacacggtttggatcatttttgatagattgaccaaatcggcgcatttccttccggtggccactacttatactacagagaagttggctcagctctatattcgtgagatcgtcaggttgcatggcgtgccactatctgtcatttcagatcgaggtcctcagttcacgtcacacttctggagagctttgcatcaggagatgggtactcgattagatctcagttcaacttttcaccctcagactgacggccagtcagagcatacagttcaaattctggaggatatgctcagggcttgtgtgattgatttcggaggtcagtgggaccagttcttgcctttggcagagtttgcatatagtaatagttatcagaccagcatctagatggctccattcgaggctttatatggtcggcgatgttgttctctgattgggtggtttgagcctggtgaagctaggctatatggtactgacatggtcagggatgctctggagaaagttaatattatccaggaaaggcttcgcacagctcagtcgaggcagaagagctacgcagatcagcgggctcgagatgtagcatttatggaaggggatcaggttatgctaagagtttcgccgatgaagggcgtcatgagattcgagaagaagggcaagttgagccctaggtatataggcccatttgaggtgttagagtgagttggtgatgttgcttatagacttgctttgcctccagcgctatcaggagttcatccagtttttcatgtttcgatgcttcagaggtatctcgcagacttctcccatgtgatcgattatagtactattcagctagatgagcagttgggctatgaggaggagcctgtggctattgttgatagacaggaccgccagttgaggtccaagacagtttcagcggttaaggtccagtggaggggccaaccagttgaggaggcgacttgggagtccgagcaggatatgcgggacagatacccacagctattcagcacatcaagtacaattctagacccgttcgaggtcgaacgtttgtttaagagggggagactataacgacccagccggtcgttttgtgtgttgggactccgttcccgtgaatgactctttccatagcggctagtcgtgccttatgacttgtgtgggcaggtagttcgatattcgaaagtgatttggccagttcaggaacacttggttcctgaaggctagcctatttggttaattttggttccgagcagcattttgagaaaacaacctcggaatcgagttctgacagctccaacaactctgaatgattatttcggacttgggagtgtgttcgccttgggtttctgatgacccgggagtatttcggcacctgaattggaattcaggatttcataagatttggaattcagcctggaattagacctcgtgatatcattgtccgaatggaattccagaactggaaatagttccgtatagtcatttatgacttgtccgcaaaatttggggtcattccgagcagtatagacccgttcggcgtattggtgagccattgaaattttcttgaaatcctaagtttgaactaaggggttttggaaggtgatttctagtttggatgatggttttagtgttctgggagctcgagagagtccgtcatgtgatttgggactcgttggtataatttttcgagggctcgggtgggcccaggggtctcccggaccccgaacggggtcaaaaaccagcaattgaactgctggtgggaatttgctggtgtgaccgcacctgcggtccatggccgcaggcgcgaggttcgcaccaacggaaaatcaatcgcaggcgcggctccctccgcaggagcggccttttctccacacgagcggaccagactccgcaggcgcgaacaatccttagggcccaggccatcgcaggtgcggccaatttcccgtgggtgcgagtccgcacctgcaatccaaagtccgcaggtgcgagaattccccagtgcccaggcctttttccgcaggagcgaccctttttcccgtaggtgcgagtccgcacttgcgatccaaaggtcgcaggtgcgaaaactgctgggcagacctataaatagcccacttcgtgacttttcatccaaaaatcaatttttcctccattgattaacgaccccaagagctccagaacgactgtttcagcccaattacctcaggtaagtaatccttaaccctccgcatgtcaaattcttccgttctttgagaatttcctcttcctaattcattgaaattcataagaaattgttgggggaagaaagaagggtttgatgaaaatgtgaattctgatttttgggccattgagggatgattaattgagttaatcttgatccttaggcgacgtatagcgcgtttcttcaagaaatataatttccggacgccgaggctcagagtggaatttccaaagtacgtcaagaatacgtttttaaagaaatatttgataaatcctcctcgaatcttcctaaattgataaaattatgtgcttttggcttgttgcgagccatcgagggtgattcggaggattcgtgcgtcgtgttgattggtccgttggccggaggagcacttgtccaggtgagtctcctttctaaactttgtaagggggaaatgtcccctaggctcttgattgctaattgtgctcgttgagggggctatgtacgtaccacgtgacgagtgtccgtacgtggcatatatactgtatatcgggtagccgtaggacccacatgcatgttctaactgtttgtttgatattatctgatgttttgtacgagttattactgatatttgatgaaattgagctatgatagctgcgaaataaatgtacataatattcagataagaattatgaacttcatcaattgagtaattgtgttactcctggtataattgataaagagcaaagagtaaatgagataatgagctgttgagctggatgaaggtggttaaaattccttcttatacttgaataatgaaataagtcttgataatgagctgttgagctaaatgaaggtggttaaaattccttctcgtactttaattgttcaatcatggtaatattatgagcaaagaggataatatgatgaaaatcgtaactttggctatcaagtgaggtgtgagtatccgatcccgttgagtgtgggcgagtcggtaccacggtgtctacatatacatacatacacacacacacacacacacacacacacacacacacacacacacatatatatatatatatatatatatatatatatatatatatatatatatatatatatatgcattcatgcagtcgcatacacacattcatgcattcatggcccccgagtcataggtttgattcgtgatcggggaaaacttatattttcatttcccctgagtcacaggtttgattcgtgatcagggaggaatttcacttatattttactagcccctgagtcacaggtttgattcgtgatcagggaggaattacactcatatttttactagctcttgaatcacaggtttgatacgtgatcagggagagatcagacttattttacttgcccatgagtcacaggtttgattcgtgatcagggagaattatactactattttcatcggcccccgagtcacaggcatgattcgtgatcggggagagttttactttgcatagtcagcacacgagtcgcaggtatgattcgtgatcatggggagcttatcattatcgagtcagcacacgagtcgcaggtatgattcgcgatcgtggggagcttatcactatcgagtcagtgcacgggttgcatgtatgattcgcgaacgtgtggagctttatgaccgagtcagtccttatgacccacccttatgacttcggccgatagtatatacgcattgcattcatccgcatttgcattgagttgggatcgtacgagggtgagttgagaaacaatacaaagtactgggaagtgaacaatagagaataaagataagacattttggataatgagaaagagaacaagtaataaaaatatgaataacttacaaaggaagactatgtttgagatcagttactgattgttgcttacatgttcttatacttgatgtactttctcatatgatttattgctcagcatgtattttattttattatgtactggaccttagtgagtatgtattctacctctcgtcactactctttacgagtttagacgggatactcactgggtacatatgtgattatatgtactcatgctgcactttctttctttttctgcacttgactgtgcaggtattgaggctggttcgtctgttcgtccgtcagctgataggtactgatcgcggcgtcgctccacacggtgagctgttttcttggcggtttcctgacagcacctctggagccttctagtttcattttgctcagtcttttgttccagactgcggcttgtatattttgtatatgtatttctgctgttgtatctatgtagtctcccgttgtcctggcacacacttgttgtagttatcggggttgtatatgtattgggcctagctgtggtccagcttgtttctacggccttaccccatattgttattgtattccgcatttttattgttattgttgttcgttggcttgcctaacctcgccgttaagcgccatcacgacctggaacggttatgggtcgtggcaaatacatatgtacataacccacatttcctgtctacggagcctctaagagtacaaaagagttatataatacttgccagtaacaaggctccggctataccctacacaaatacaaaaatgaaagtccgggagaagaggtggcatgaaccacacagggccccgagaggaaaggggctcaccaaaacagctgatgggacacagatgaggcactactgtttgtgggctggagtacctgctatataaccacctacaatcatcacaagaatgtagcgcccccggcaaaagggacgccagtacatttgaattgtactggtatgtatgaacaaactttactctaagtaaattcaacaatgcacaggcaagagacagacagagagtcacacaaccactgcaaaacgatatagaaagaaacacaatggaagttcctcaattatcacttcatcacaatcacaatcacaattccacccttatcccttctcaacattcaacccttatttcttctgttgcggcgcgcaacccgatcccactcgacaataataatcatttcttatgtttctgttgcggcgtgcaacccgatcccaccggacaatcacacctctcccttatcacttctcacatatcacccttatccctccctttgcggcacgcaacccgatcccaccaaacaatcatatctcatatcaacaacgacagttcacaattcaatcacagaaaatttcagcaataggaatatagttttctttttacaacccacattacgtgtataaaataaatatcgtgccacaataaaccttaccaaacagtgaatcatatacgatattgccacagccgtttagttcaattacatcacagcacaactccttttcgttacttgttacacaacctttagcatatacattcatactcttggattcattaacctactagcatcatttcacgtagcatgatagtgtggtgatcaactaaagacagacaaggaatacacttcacgcttcaacacaattgaacaaccatttgcacatattcacgccaatacacgtaccgtatgctcggacactaccaaacgattttacaaatattaaagttagccatacatacctggagtcgagtttccctttttaatttctatcacaattcaccgaaccgtctagcactgtcaatctagtttacaatgccacacatttaccttagaattaggaatcttgaattcatttgagcattttatcaaacaccatgtggtaccttagcttaactaaaacccattttagtgaaagattactctaactagcttccttttactaggtcatggaagattattcacatgcatgcaagtcttatcttttaatctcaagaaccaacctatgtgtgctttattctaactaaaatctgagaattaaagggaaatggggtggggacttacctcttagagtgaagaagatgaagattacttgataatttccgggcctgagtgatgtttgaagaatcaatttggggaagatggggacttctctctcaagaactctctttttcttctctctatattgtttagaatccagttataatgaaaaggggtaggggttaaatgaagctggggtcgggtataaaagtttggaaaattaaaagcccgtgtcaaatatgtggtcaggaatgcggtccacagagctgaccgcagaagggccccaggtgggcaaatttggaaacaatctgcccaggtatgtgaccactatacagtccgcatactcgttatgcgatcccatagtgcgtcgcataacacccctccccaaaatcaaaggcaataatgcgacagatatgcggtccgcagaaccgaaatgtggtcgcagattggaccgcatagttgtccttcagttgggcagtgatttgcccgtgtatgcgaccactatgcggtccgcatacacgttatgcgatcgcatagtgcgtcgcataacacccaatttatggaaaatttaattctttaactcccggggtactttttgttcaaattaggtccattttaggaatttccacagtaaaaacaactcgaggactcattcgggcattattttaagcaagaaattttacgggtctttacatcctcccccccttaaaatcattcgtcctcgaatgaggatttggaaatcaattattttgaaagcatgatatgaaatttccagatttttttacaaattctgattatgttagaaatattttgccagagtttcctgtgtaattaggcctatctacctgttagagagccctcgaaacacatttcgaagcactattacatagttttaaccattcaatagctcacacaccaagttgttactgtcacgccccaaaaccgagggacacggccgacgctcgaccgggtagccccagttaagcggacctgaattcctttttccatcccacgtattactctgagattccaatgtacattattcaattataattacaacccattcttacaatctgaaattaaattctagatttctttcattacccacatgtggtacaatgcttacaaaatgtacataacacacagttttactttacgtggtctacaagttatactgcccaaaatacatatgtacacaacccacatttcctgtctacggagcctctaagagtacgaaggagttatataatacttgccggtaacaaggctccggctataccttacaaaaataccaaaataaaaatccggaagaagaggtggcatgaaccacacagggccccgagaggagaggggctcatcaaaacagctgatgggacgtaggggaggcactactgtcagtgggctggagtacctgctatagaaccacttacaatcatcacaagaatgtagcgcccccgacaaagggacgttagtacatttgaattgtactggtatgtatgaacaaactttactctaagtaaactcaacactgcataggcaagagacagacatagatctagtcacgcaatcactgcacaagatatagaaagaaacacaatggaagttccacaattttcacttcatgacaattacaatcgcaattccacccttgtcccttctcaacatttcacccttatttcttattttgcggtgcgcaacccgatcccacctgtcaatcacaatcatttattatgtttctgttgcggcgtgcaaccctatcccaccggacaatcacaatcatttgttgtgtttctgttgcggcgtgcaacccgatcccaccggacaatcacaatcatttgttgtgtttctgttgcgacgtgcaacacgatcccaccggacaatcacatcacacccttatcacttctcacatatcacccttatccctgctgttgcggcgcgcaacccgatcccaccaaacaatcatatctcacatcaacaatgacaattcaaaattcaatcacagaaaatttcagcaataggaacacaggttctttacaacccacaatacgtataaaaagaaaatcgtgccacaacaaaccttaccaaatggtgaatcatatacgatatttccacagcctttttattcaattacatcacaccacaattcctcttcattacttgttacacagcctttagcatatacattcatactcttggatttattatcctactagcatcatttcacatagcatagtagtgtggtgatcaactaaagatagacaaggaatacatttcacgcttcaacacaattcgaacaaccagttgcacatattcaaaccaatacacataccgtatgctcggataccacaaagtgattttacaaagattaaagttagccatacatacctggagtcgagtttccctctttaatttctatcgcaattcaccgaaccgtctagcatcgtcaatctagtttacaatgcgacacatttaccttagaattaggagtcttgaattcatttgagcatttaatcaaacactatgtgatcccttagattaactaaaccctttttaatgaaagattactctacttgcttccctttactaggttatgaaagattattcatatgcatgcaaggtctcaacttttcatcctcaagaacaaacctatgtgtgttttattcctagctaaattatgagaatttggggaaatagggtaaagacttacctcttatgatgaagaagatgacgactattcgataaacttccatgcctaagtagagatggaggaccaatttggggaagatgaggagttctcactctagaacccactctcacttgtctctattttgattagaaaccagttaaaatgaaagggggtaagggttaaatgaagctaaggtcgaatatgcgttcaggaatgcaatcgcattcttgacatgcggtccgcagagttgacagcagaatgggcccccaggtgggccaaaatttgaaaacaatctgcccaggtatgctaccactatgcggtccgcatactcgttatgcgatcgcatagtgcgtcgcataacacccctccccaaaacacaaaggcaataatgcgacagatatgcagtccgcagaaccgaaatgtggtcgcagattggaccgcatagttgtccttcagtttggaagttatatgcctgtgtatgcgaccactatgcggtccgcatacacgttatgcgatcgcatagtgcgtcgcataacacccaatttctggaaaatttaattccttaactcccggggtactttttgttcaaattagatatgttttaggaatttccatagtaaaagcaactcggggacttgttcgggcattattttaagcaataaattttacgggtatttacatcctcccccccttaaaatcattcgtcctcgaatgaggattttggaaatcgtttggttttgaaaacatgatatgcaaactcccagatttacactaactccaatattttcagaaattttcgccagagtttcctttgtaattaggcctatctacctgtcagagagcccccgaaacacatttccaaacattattacacagttttaaccattcaatagctcacacaccaagttgttacctcaacaatttacagtatttgatcactttatcaactacacataactcattctccttacctcacaattgcacatgattcaattagtgtgacatatctgcacataactttggccatttcagtgcgccccatacagttcaatcacctcaatagatcatagacaattcatttaaccattaccaatctacactaccattaatcacttacttagcacatttgtttcacaaaacttttatttgctttaaaggggttaatttttttttttttgcaagtaagggcagcacgaacaattttggtatgagaaaagttacaacaaccaggcactttaggggaaaacaagatatggtcccttcctatgcaacattaaccacaacttacatttgcctgggaataggaacacacacgattcactactagactcattcaaacaagtgagggtacttttctttcatttccttctccgcttccaatgtagcttctacgacttgctgacttcgccataacactttgactgaagaaatttccttatttctcaatttacggacttgcctataaagaatagcaactggaacctcgtcatatgatagctcttcatttacctcaatggttttgactggcacgattttggatgggtctccaattacctttttcaacatggacacgtggaacaccgggtgcactaatgacaacccaggcaattccaacctataagctagttgccctatactttgagcaatccgatacggcccgatgtacctagggctcaacttccctttcttcccaaaccgcatcactcccttcatgggagacacctttaagaacacccaatcatctacttggaattctaattctctccggcgtaagatttctggcgactctgcgcagttttcatcctttcctgaatgactctaactttctccatagcttggtgcacaagatctggtcctaacaattctgcttcaccaacctcgaaccatccgatcggagatctacacctccttccgtacaatgcctcaaacggggccattcggatactgacatggaagctgttattataagaaaactcgacaagcggcaaatggtcatcccaatcacccttgaagtctaaaacacaagctcgtagcataccttcaagcgtctgaatagtccgctctccctgaccctcagtctgtggatggaaagccgtgctaagatttacctgagtacccaaaccttgctgaaatttccgccaaaaattagctgtgaattgggcccctcgatctaagataatagaaattggagtgccatgaagtctaactatctccttgatgtacacttgagcatactgttccgctgtgtcggtggacttgactggcaaaaagtgagctgattttatgagttgatccactatcacccaaatcgagtcgaacttgcgctgagtgcgaggtaaccctaccacgaaatccatattaatcatttcccacttccacattggtatttccacaagctgtgttaacctaccgggcctctgatgctcggccttcacctgttgacaatttgaacatttggatacaaggtccgccacatccgtcttcataccgctccaccaataaatttcccggaaatcatgatacattttcgtagaacctggatgcatggaatacctggaattgtgtgcctccaccattaccctttcccgaagaccatccacatcggagacacacagcctacccagacatcacaatacagcatcattgttgccgagtaaaaatgctgaattctggccattcaaaactgcctccctcaactgcgccaatgctggatcaataaactacttttccttgacttccgctacaagtgacgattctgccccattatgcaccacgacattccctttgtctaaggtcgagagactaacccccagactggctaattggtaaacctcccagccaaaggcctctgatctgcttccaaatgagccaaactacccatagacttccgacttagagcgtcagccaccacattcgcctttcctggatggtacaagattttcatatcataatccttaaacaattctaaccacctccgctgccttagattctgttccttctgcttgaataaatactgaagactcttgtggtctgagaacacgtccacttggactccataaagataatgccgccaaaattttaatgcaaacaccactgccgcgagctccaaatcatgcgtcggataattcttctcgttattcttgagttgccttgaagcatacgctataaccttcccatgacgcatcaacacacaccccaaaccaacccttgaaagatcgcaataaaccacaaatccctctataccttctggaccttctggcaaggtcaataccggtgccgaagtcaatctcgacttcaattcctgaaaacttttctcacaagcgtcggaccactggaacttcaccgctttctgcgtcaatttagtcaatggggaggcgagggtagagaatccctccacaaacctctgataatacccagctagacccaagaaactacgaatctctgtcggggtcgttggtctaggctaatctttcatcgtcgcgatcttctgggtatcaatctgaatcccttctctggaaacaacatgacccagaaacgcaactaattctagccaaaactcacatttcaaaaatttagcatacaactagtgacgatgaagagtctataggactgccctgaggtgattagcatgaacttcccgactccgtgaatagacaaggatgtcatcaataaaaacaatcacgaaggagtctagaaatggcttgaaacccgattcataagatccatgaaagctgctggagcattggtcagcccaaaggacattaccaaaaattcaaaatgaccataacgagtcatgaaggaggtcttaggaatatctttctctctgatctttaactgatgatacctagaccgtaaatcaattttggagaagaacctcgcaccttgcaattgatcaaacaaatcatctattcgaggcaatggatacttgtttttgatagtgactttgttgagctgccgataatcgatacacatctgaagcgacccatccttctttctgacaaaaagaaccgaagcgccccacgacgacacactcggccgaatgaaccctttttcaaataaatccttcaactgctcctttaactccctcaactctactggtgccattctgtattgtggaatagatataggttttcgtatctggaaatacatcaatctcgaaatcaatctccctatctggcggaatccttgggagctcgtccggaaacacttcaagaaacgcattcacgactggcacgaattcgggggccgacacttctgaagtggtgtctgcgaccctgaccaaatgatagatacatcccttcttaatcatcttcaaagccttaaggtaggaaataaacctacccttcggcaccagaccattccccttccactcaataatcggctcattaggaaactcgagtctcatgactctcgttcggcagtcgagtttagaaaagcatgaataaagccagtccattcccataataatatcaaaatctaccatcccaagctctataagatcggtcgtggtaacgcgaccacataccgtgacaacacaattcttatagactcgcgttgttgtaatagaatcaccaaccggagtcgatacagagaacgactcatgaagctgttggggttctatccaaaaacttgaagcaataaacggggtaacataacacaaggaggacccctgatcaataagagcataacaatcaagtgcttgaacattcagaatacctgtaacaacatctggagaagcctctgtgttctggagaccactcaaagaatagaatcggctgggtccacctctaccacgagcgccacccctaaatgcaccacgtcctgctggagatggaggacgcactgaagatgtggcggctgaagaaccggatgactgggaaaatcccctacccatgccctggctgggcgcacggcaatcccgttgaagatgacccatcaccccacacatgtagcatatcggcgacccaaataacaagcctcagtatggaaccctccgcgcttagggcacggagccctcccctgttgctagaactttcctctgggatgacctgactgatggggtctcctactgtcggatcctggtctccaataacgattcggctgataaaggtgcacggatggcggtgcactggctgaggaatgtgcataagactgggatggccctgatggacccctcccctgaactggtctccctcctgcaactgcgctccctaagtgacccactgactgggctctgctgctactctccctgtctgcccatatcttcaactatctagcctccgtggcctaggcgaaccccacaatctttccataattcatatccgagtgtaaagccgttgtagcagcctcattcacaaccaaaggactgagacccttaacaaatcgttgagctcgagcatccacgaactcgtcccatttagccggaggacttccctcccgacgggaaccctcccacatctcgaaccaggaatatgctgctcccctcagcatgtacgaagctaactcgaccccctctgtctctgtagccttcatcacccgaagggtcttgtacatctcatcaagaaaatcctatggatcgacctctagatccgtacctgagaactctggaggggctaaccgcagaaactggttgactctggagccggcggaatctccctgtccgctggaggacgcaggggtagcgtgagatctttaggcttgagtggccaccaactgagtcaacataagaatagctcatctgaggtccccctaggacgtaccaggaccggaagctggaaccgtaaagggatcaggaatattagcgggagggattgcaacaccctccatcgccccaggaataagaatgctttgatccggaatataagggtcaggcatattcaaggtcggggagtcactctcacccgcactaccaggtacatgattcacagccacatttggggtggcattggcctcaaggccgagtcgagctctcttctttggtgtcattactgaaaattttgaaacaaaacacgaattaggcaaggatattttcactttccggttcaccgcacgatatagaataacaataagagggtaatttcctaaatgtcgatgtagccccctaattatagatatggtcgacaacacaccgatacgaagggctctactagacacggctccgagacgtcctaggactcttttaaaccttaggctctaatactaagtttgtcacaccccaaaaccgagcgacacgaacggcactcgaccgtgtagccccagtcaagcggacctggattcccttttccatcccacgtaataccccgtgattccaatgtacattattcaattgtaatttaaacacattcttacaacttggaattaaattctagatttctaacattacccacatgtggtacaatacttacaaaatatacataacatacaggttcactttacgtggtctacaagttatactgcccaaaattcatatgtacataacccacatttcctgtctacggagcctctaagagtacaaaggagttacataatacttgccgaaaacaaggctctgcctataccctacacaaataccaaaatgaaagtccgggagaagaggtggcatgaaccacacaaacgaggcactattgttggtgggttggagtacatgctatagaaccatctacaatcatcacaagaatgtagcgcccccggcaaaagggacgtcagtacatttgaattgtactatatgtatgaacaaactttactctaagtaaactcaagaatgcacaggaaaaagacagacagagagtcaaacaatcactgcacaacgatatagaaagaaacacaatggaagttccacaattctcacttcctcacaatcacaatcaaatttccacccttatcccttctcaacattccactcttatttcttctgttgcggcgcgtaacaagatcccacctgacaatcacaatcatttattatgtttctgttgcggcgtgcaacccgatcccaccggacaatcacacctcaccattatcacttctcacatatcacccgtatccctcatgttgcggtgcgcaacccgatcccaccagacaatcatatctcatatcagaaatgacagttcacaattcaatcacagaatctttcagcaataggaatacaatttttttttacaacccacattacgtatataaaaaataatatcgtgccacaataaaccttaccaaacagtgaatcatatatgatattgccacagccgtttagttcaattacatcacaccacaactccttttagttacttgttacacaacctttagcatatacattcatactcttgattcattaacctactagcatcatttcacgtagcatggtagtgtggttatcaactaaagacagacaaggaatacacttcacgcttcaacacaattgaacaaccatttgcacatattaacgccaatacacgtaccgtatgctcggacaccaccaaacggttttacaaagattaaagttagccatacatacctggagtcgagtttccctttttaatttctatcacaattaaccgaactgtctagaaccgtcaatctagttcataatgttacaaatttaccttagaattaggaatcttgaattcatttgagcattttataaaacaccatgtggtcccttagcctaactaaaacccattttagtgaaagattactctaactggctttcttttactaggtcatggaagattattcacatgcatgcaagtcttatcttttaatctcaagaaccaacctatgtgtgcttcattctaactaaaatctgagaattaaagggaaatgaggtggggacttacctcttagagtgaagaagatgaagattacttgataatttccgggcctgagtgatgtttgaagaatcaatttggggaagatggggacttctctctcaagaactctctttttcttctctctatcttgtttagaatcaagttaaaatgaaagggggtaggggttaaatgaagctggggtcgggtataaaagtttggaaaattaaaagctcgtgtcaaatatgcggtcaggaatgcgatgacatgcggtccgcagagctgaccgcagaatggccccaggtgggccaaaatttggaaacaatctgcccaggtatgcgaccactatgcggtccacatactcgttatgcgatcgcatagtgcgtcgcataacacccctccccaaaatcaaaggcaataatgcgacagctatgcggtccgcagaaccgaaatgcgatcgcaaattggatcgcatagttgtccttcagttgggcagtgatctgcccgtgtatgcgaccactatgcggtccgcatacatgttatgcgatcgcatagtgcatctcataacacccaatttttggaaaatttaattttttaactcccggggtactttttgttcaaattaggtccgttttaggaatttccacagtaaaaacaactcgggtactcatgcgggcattattttaagcaagaaattttatgggtctttacagaaaaattggaaatcatactttttcaaaggattttttatggaaactggtttttaacatatgtactaaatgtatacaccgccaaaactcggtatttcactatttgtgaattgatgttttgttgctgtgtctttcttaccgtcagacttgatttattttcattactactaagttggcatactcatcattactccctacacctctgtgtacagatccaggtactgcttccgagtagtatccatctgagtccgtacgacgtcagcatttgggatttcgacgtagttgtcccgtgtccacagcttctccatttcccttccctcatttcatatttagtattttgttctgagacactgtattatgacattagcagtattagtattactcttagatgctcgtgatctgttgactccagttctcgggattggttatagaatgttagcttaattatgcttggttaaagactttttatggataattattaatgttttggaaaaatcttaccaaaggaaatgtgtaattttgtgatagtggctagcctagttccacgataggcgccatcacgaccagttaggatttgggtcatgaaaattttgctgtcgcggtttcatgctccgctgtagcgttcagtattctgctaggaccggaatgaaggttcagataagtagctgattcaaaaatgcggtccgcgctcattatttcgctgtcgcggaagtcatttcgctgggacgtctataattccactaggagcggaatctccgtaggagcaattttttccagtatttctagctttgtataatactactctttctcatttttagggcatcagacatttagggacctcgtgaatagtgtactttttccgttttgagtaattttagtttagattctaccattattcttagattttatccttttaatcaacatctatgggtttaatttcatcttctatcttaatttcgtccatgaaaatgagtagctagaatagggtttggggggttataggtaattaaaaaaggtaataatatcctggaccgttgatctctaagatcaacggccacgattcgatctagggttgggcgggtttaaagatgggttatgggtattcgatcatggttagtttaattgggctggggtagtaatttgggccaagtcagaaaagaaatcaaataaaagagactatttgttaaatacccaattaacttgataaagtaatttataaaatagctaataaatgataaaaattgtaacgacccaaattcctactcaggtcgtggtggcgtccaacaccgaagtcgggcaatccaaactagttacta

SEQ ID NO: 3 - DNA, 40 bp, synthetic construct
  misc_feature 1..40: note = The sequence is synthesized.
  source 1..40: mol_type = other DNA
gaaggtgaccaagttcatgctcgtttactggcgcctgatc

SEQ ID NO: 4 - DNA, 39 bp, synthetic construct
  misc_feature 1..39: note = The sequence is synthesized.
  source 1..39: mol_type = other DNA
gaaggtcggagtcaacggattgtttactggcgcctgagt

SEQ ID NO: 5 - DNA, 21 bp, synthetic construct
  misc_feature 1..21: note = The sequence is synthesized.
  source 1..21: mol_type = other DNA
ctccgtctacactgactacct

SEQ ID NO: 6 - DNA, 41 bp, synthetic construct
  misc_feature 1..41: note = The sequence is synthesized.
  source 1..41: mol_type = other DNA
gaaggtgaccaagttcatgcttcagtggcaaaagctgcaag

SEQ ID NO: 7 - DNA, 41 bp, synthetic construct
  misc_feature 1..41: note = The sequence is synthesized.
  source 1..41: mol_type = other DNA
gaaggtcggagtcaacggatttcagtggcaaaagctgctaa

SEQ ID NO: 8 - DNA, 25 bp, synthetic construct
  misc_feature 1..25: note = The sequence is synthesized.
  source 1..25: mol_type = other DNA
gccacacaggatctctcattgattg

SEQ ID NO: 9 - DNA, 44 bp, synthetic construct
  misc_feature 1..44: note = The sequence is synthesized.
  source 1..44: mol_type = other DNA
gaaggtgaccaagttcatgctcactgattcagatcttgagggat

SEQ ID NO: 10 - DNA, 45 bp, synthetic construct
  misc_feature 1..45: note = The sequence is synthesized.
  source 1..45: mol_type = other DNA
gaaggtcggagtcaacggattacactgattcagatcttgaggaag

SEQ ID NO: 11 - DNA, 19 bp, synthetic construct
  misc_feature 1..19: note = The sequence is synthesized.
  source 1..19: mol_type = other DNA
gttttccccacactcaggt

SEQ ID NO: 12 - DNA, 42 bp, synthetic construct
  misc_feature 1..42: note = The sequence is synthesized.
  source 1..42: mol_type = other DNA
gaaggtgaccaagttcatgctagatacctttccgaactccgg

SEQ ID NO: 13 - DNA, 43 bp, synthetic construct
  misc_feature 1..43: note = The sequence is synthesized.
  source 1..43: mol_type = other DNA
gaaggtcggagtcaacggattgagatacctttccgaactccca

SEQ ID NO: 14 - DNA, 25 bp, synthetic construct
  misc_feature 1..25: note = The sequence is synthesized.
  source 1..25: mol_type = other DNA
ggagaggtccaaagttactaaatcg
